(19) United States
(12) Patent Application Publication
(10) Pub. No.: US 2006/0270005 A1
(43) Pub. Date: Nov. 30, 2006

(54) Genomic library of cyanophage s-2l and functional analysis

(75) Inventors: Philippe Marliere, Paris (FR); Pierre-Alexandre Kaminski, Paris (FR); Frederique Galisson, Finhaul (CH); Madaleine Bouzon, Meudon (FR); Sylvie Pochet, Paris (FR); Jean Weissenbach, Paris (FR); William Saurin, Paris (FR); Catherine Robert, Evry (FR); Virginie VIco, Evry (FR)

Correspondence Address: C. IRVIN MCCLELLAND;OBLON, SPIVAK, MCCLELLAND, MAIER & NEUSTADT, P.C., 1940 DUKE STREET, ALEXANDRIA, VA, 22314, US

(73) Assignees: INSTITUT PASTEUR, Paris (FR); CENTRE NATIONAL DE LA RECHERCHE SCIENTIFIQUE, Paris (FR); GENOSCOPE- CENTRE NATIONAL DE SEQUENCAGE, Evry (FR)

(21) Appl. No.: 10/510,953

(22) PCT Filed: Apr. 28, 2003
(86) PCT No.: PCT/FR03/01328

§ 371 Date: Dec. 2, 2005

(30) Foreign Application Priority Data
Apr. 30, 2002 (FR) 02/05424

(51) Int. Cl. C12P 19/34; C12N 9/22; C07H 21/04; C12N 7/00; C12N 15/74; C07K 14/005

(52) U.S. Cl. 435/91.2; 536/23.72; 435/472; 435/252.3; 435/235.1; 530/350; 435/199

(57) ABSTRACT

The invention relates to the genome sequence and the nucleotide sequences coding for polypeptides of cyanophage S-2L. According to the invention, the polypeptides include, but are not limited to, polypeptides involved in the synthesis, transcription and replication of purine bases. In particular, determining the genome of cyanophage S-2L is useful for supplying genes which, expressed in recombinant bacteria, enable the synthesis of DNA monomers incorporating base D (2,6 diaminopurine instead of base A (adenine), thereby producing chemically-remodelled nucleic acids in the bacteria.

[0001] A subject of the present invention is the gene sequence and nucleotide sequences coding for polypeptides of cyanophage S-2L. The polypeptides described in the present invention are, in a non-limitative way, polypeptides involved in the synthesis, transcription and replication of purine bases. In particular, the determination of the genome of cyanophage S-2L is a useful tool for producing genes, which, expressed in recombinant bacteria, allow the synthesis of DNA monomers incorporating the D-base (2,6 diaminopurine) instead of the A-base (adenine) and thus the production of chemically remodelled nucleic acids in the bacteria.

[0002] The invention also relates to the use of the gene sequence and/or of the nucleotide and/or polypeptide sequences described in the present invention for the analysis of the expression of genes.

[0003] The two main nucleic acids DNA and RNA are polymers of nucleotides which are made up of a purine or pyrimidine base linked to a sugar with 5 carbons (deoxyribose in the case of DNA, ribose in RNA) via an N-glycosidic bond and an esterified phosphate with the hydroxyl carbon group situated in position 5′ of the sugar: RNA and DNA contain four types of nucleotides which are distinguished by their bases: adenine (A), guanine (G), cytosine (C) and uracil (U) for RNA; 5-methyluracil, i.e. thymine (T), replacing uracil in DNA.

[0004] Amongst the possible chemical alterations of DNA and of RNA only modifications of the bases and not of the sugar were observed. By contrast with DNA no modified RNA has been able to be replicated until now.

[0005] Modified bases are observed in the DNA of all organisms, and can be involved in phenomena of regulation of gene expression (5). Except in bacteriophages, the DNA modifications known until now are produced by post-replicative enzymatic reactions, a DNA duplex of which is the substrate.

[0006] By contrast, during infection with certain bacteriophages, the DNA modifications known until now are produced by prereplicative enzymatic reactions, a nucleotide of which is the substrate, in order to lead to a non-canonical triphosphate deoxynucleoside. Among the known modifications the following entities are mentioned: dUTP, 5-hydroxymethyl-dUTP, 5-dihydroxypentyl-dUTP, 5-hydroxymethyl-dCTP. Another entity is strongly suspected: 5-methyl-dCTP (11). The emergence of the modified bases in the bacteriophages is generally interpreted as a counter-measure to the bacteria restriction systems (11).

[0007] A few examples of modified bases are shown in FIG. 1.

[0008] Bromouracil or 8-azaguanine are synthetic analogues of the natural bases thymine and guanine. These analogues are converted into triphosphate nucleotides by the protection pathways of the purines or pyrimidines and are then incorporated into the DNA. 6-methyladenine and 5-methylcytosine are the most frequently encountered modified bases. The methylated nucleotides are not incorporated as such in the DNA but are the product of the action of specific DNA methyltransferases. These enzymes transfer the methyl group of S-adenosylmethionine to the adenine or cytosine, after the replication of the DNA. In the prokaryotes the main role of DNA methylation is the degradation of the foreign DNA. In the eukaryotes DNA methylation influences the regulation of gene expression and cell differentiation.

[0009] In certain T-type phages such as bacteriophage T4, the cytosine is systematically replaced by 5-hydroxymethylcytosine. This substitution requires on the one hand a biosynthesis route of hydroxymethyl deoxycytidine triphosphate (HMdCTP) as well as enzymes allowing the exclusion of the normal base.

[0010] The biosynthesis route of the HMC-DNA involves a hydroxymethylase which converts the dCMP into hydroxymethyl dCMP, a nucleoside monophosphate kinase which phosphorylates the HM dCMP in order to produce diphosphate, precursor of HM dCTP which is then incorporated into the DNA polymerase then glycosylated by a glycosyltransferase.

[0011] The exclusion of the cytosine involves on the one hand specific endonucleases of DNA containing this base and a dCDPase-dCTPase which converts the corresponding nucleotides into dCMP which is then the substrate of the dCMP hydroxymethylase and dCMP deaminase. The dCMP deaminase generates the dUMP precursor of dTMP.

[0012] By means of a mechanism similar to that described above, the thymine is replaced by 5-hydroxymethyluracil (phages SPOL and Φe) or uracil (phage PBS2) in several Bacillus subtilis phages (Warren, 1980; Komberg and Baker,1991).

[0013] Other phages such as SP15 or ΦW14 have a DNA whose thymine was replaced by 5-dihydroxypentyluracil and α-putrescinylthymine. However, this replacement is only partial and seems to be due to post-replicative modifications.

[0014] In the case of S-2L, the synthesis route of the D-base is not yet completely established and the post-replicative modification of adenine to diaminopurine cannot be totally avoided. However, the biosynthesis of the non-canonical dDTP monomer appears to be significantly more likely, given the fact that the replacement of A with D in the DNA of S-2L is total and not substantial (7,8), as is the case for the post-replicative modifications of hydroxymethyl-U to putrescine-T in the ΦW14 phage. Moreover, the modification of A to D in situ would require the rupture of the hydrogen bonds of the DNA duplexes and, being difficult to carry out in one chemical stage, would introduce mutagen lesions if this process were interrupted.

The Cyanophage S-2L

[0015] The cyanophage S-2L was isolated from water samples taken in the Leningrad region. This phage is capable of lysing a relatively restricted number of Synechococcus: sp. 698.58 and PCC6907. From a morphological point of view it is composed of an icosahedral head and a flexible non-contractile tail. S-2L belongs to a family whose other member could be the SM-2 phage which is morphologically similar (Fox et al. 1976).

[0016] The DNA of the S-2L phage is linear and double stranded with a size of 42 kb composed of 70% G:C and 30% of a pair equivalent to A:T in which the adenine has been replaced by 2,6-diaminopurine (D). This replacement is total and no other base has been able to be identified (Kimos et al., 1977; Khudyokov et al., 1978). As has been seen previously, only total replacements of pyrimidine bases have been reported, S-2L is the only case for a purine base to date.

[0017] As in the G:C pairs three hydrogen bonds are formed between the purine and the pyrimidine of the D:T pair which gives the DNA a greater stability.

[0018] The presence of the D-base in the DNA of S-2L causes a resistance to digestion by restriction endonucleases possessing an A in their recognition site (the restriction enzyme TaqI being the only exception). However, the D:T pair seems to be recognized as a G:C pair by the restriction enzymes cleaving the sequences rich in G:C such as SmaI (Szekeres and Matveyev, A. V., 1978).

[0019] Given that the A-base is totally and not just mostly replaced by D, it is very likely that the genome of the S-2L phage codes for at least one biosynthesis route of the D-base.

[0020] With regard to the prior art, the study of the cyanophage S-2L requires new approaches, in particular genetic ones, in order to improve the comprehension of the different metabolic routes of this organism.

[0021] Thus, an object of the present invention is to disclose the complete sequence of the genome of the cyanophage S-2L and of all the genes contained in said genome.

[0022] In fact, knowledge of the genome of this organism allows better definition of the interactions between the different genes, the different proteins, and, the different metabolic routes. In fact, in contrast to the disclosure of isolated sequences, the complete gene sequence of an organism forms a whole, making it possible immediately to obtain all the information necessary for this organism to grow and function.

[0023] The invention is in particular aimed at sequencing the genome of the S-2L phage, so as to obtain a pool of genes which, once propagated in isolation and expressed under control in recombinant bacteria, are intended in particular to form by biotechnological route new monomers of DNA and to produce, or replicate, chemically remodelled nucleic acids in bacteria.

[0024] The invention is also aimed at using nucleotide sequences obtained for the identification of the metabolic routes leading to the production of the D-bases.

[0025] The invention is also aimed at the enzymatic production of analogues of deoxynucleosides which are very useful in particular in chemotherapy for AIDS.

[0026] The invention is also aimed at expressing in a S2L cyanophage host nucleic acids coding for proteins involved in the metabolism of the D-bases.

[0027] Thus the invention is also aimed at obtaining S-2L genes which, propagated individually in E. coli and expressed under strict transcriptional control, allow testing of the hypotheses concerning their function in the metabolism of nucleotides, replication and transcription.

[0028] To achieve the various technical results sought, according to a first aspect the invention relates to a nucleotide sequence of cyanophage S-2L corresponding to SEQ ID No. 1.

[0029] The present invention also relates to a nucleotide sequence of cyanophage S-2L chosen from:
[0030] a) a nucleotide sequence comprising at least 80%, 85%, 90%, 95% or 98% identity with SEQ ID No. 1;
[0031] b) a nucleotide sequence hybridizing under high stringency conditions with SEQ ID No. 1;
[0032] c) a nucleotide sequence which complements SEQ ID No. 1 or which complements a nucleotide sequence as defined in a), or b), or a nucleotide sequence of the corresponding RNA;
[0033] d) a nucleotide sequence of a representative fragment of SEQ ID No. 1, or of a representative fragment of a nucleotide sequence as defined in a), b) or c);

[0034] e) a nucleotide sequence comprising a sequence as defined in a), b), c) or d); and
[0035] f) a nucleotide sequence modified from a nucleotide sequence as defined in a), b), c), d) or e).

[0036] More particularly, a subject of the present invention is nucleotide sequences characterized in that they are from SEQ ID No. 1 and in that they code for polypeptides chosen from the sequences SEQ ID No. 2 to SEQ ID No. 527 or a biologically active fragment of these polypeptides.

[0037] Moreover, the invention also relates to the nucleotide sequences characterized in that they comprise a nucleotide sequence chosen from:
[0038] a) a nucleotide sequence from SEQ ID No. 1 and coding for a polypeptide chosen from the sequences from SEQ ID No. 2 to SEQ ID No. 527.
[0039] b) a nucleotide sequence comprising at least 80%, 85%, 90%, 95% or 98% identity with a nucleotide sequence according to a);
[0040] c) a nucleotide sequence hybridizing under high stringency conditions with a nucleotide sequence according to a) or b);
[0041] d) a nucleotide sequence which is complementary or from RNA corresponding to a sequence as defined in a), b) or c);
[0042] e) a nucleotide sequence of a representative fragment of a sequence as defined in a), b), c) or d); and
[0043] f) a nucleotide sequence modified from a sequence as defined in a), b), c), d) or e),

[0044] Preferably the invention relates to a nucleotide sequence characterized in that it codes for a polypeptide chosen from:

[0045] a) the polypeptides of the cyanophage S-2L of sequences SEQ ID No. 2 to SEQ ID No. 527;

[0046] b) preferably the 54 polypeptides mentioned in Table 1 namely: SEQ ID No. 14, 18, 26, 68, 86, 92, 105, 109, 134, 142, 143, 148, 152, 169, 175, 187, 208, 211, 234, 246, 250, 257, 264, 286, 298, 316, 332, 342, 347, 348, 351, 355, 364, 365, 369, 370, 392, 395, 406, 418, 422, 425, 429, 432, 433, 454, 464, 466, 472, 484, 489, 494, 500;

[0047] c) preferably also the 14 polypeptides of the cyanophage S-2L shown in Table 1 as having a significant homology namely the sequences SEQ ID No. 86, 92, 152, 175, 234, 257, 298, 316, 395, 406, 425, 484;

[0048] d) the polypeptides having at least 80% preferably 85%, 90%, 95% and 98% identity with a polypeptide from a), b), c);

[0049] e) the biologically active fragments of the polypeptides from a), b), c), d) f) the polypeptides modified from a), b), c), d), e).

[0050] The invention also relates to a nucleotide sequence characterized in that it comprises a nucleotide sequence chosen from:
[0051] a) a nucleotide sequence as defined above;
[0052] b) a nucleotide sequence comprising at least 80% identity with a nucleotide sequence from a);
[0053] c) a nucleotide sequence hybridizing under high stringency conditions with a nucleotide sequence from a) or b);
[0054] d) a nucleotide sequence which is complementary or from RNA corresponding to a sequence as defined in a), b) or c);
[0055] e) a nucleotide sequence of a representative fragment of a sequence as defined in a), b), c) or d); and
[0056] f) a nucleotide sequence modified from a sequence as defined in a), b), c), d) or e).

[0057] By nucleic acid, nucleic or nucleic acid sequence, polynucleotide, oligonucleotide, polynucleotide sequence, nucleotide sequence, terms which are used indiscriminately in the present description, is meant a specific sequence of nucleotides, modified or not modified, allowing the definition of a fragment or a region of a nucleic acid, comprising or not comprising unnatural nucleotides, and able to correspond to a double strand DNA, a single strand DNA as well as the transcription products of said DNAs. Thus, the nucleic sequences according to the invention also include the PNAs (Peptide Nucleic Acid), or analogues.

[0058] It must be understood that the present invention does not relate to nucleotide sequences in their natural chromosomal environment, i.e. in the natural state. It concerns sequences which have been isolated and/or purified, i.e. that have been sampled directly or indirectly, for example by copying, their environment having been at least partially modified. It thus also designates the nucleic acids obtained by chemical synthesis.

[0059] By “identity percentage” between two nucleic acid or amino acid sequences in the context of the present invention, is meant a percentage of nucleotides or amino acid residues which are identical in the two sequences to be compared, obtained after the best alignment, this percentage being purely statistical and the differences between the two sequences being randomly distributed and over all of their length. By “best alignment” or “optimal alignment” is meant the alignment in which the identity percentage as determined below is highest. The comparison of sequences between two nucleic acid or amino acid sequences are traditionally carried out by comparing these sequences after having aligned them in an optimal manner, said comparison being carried out by segment or by “window of comparison” in order to identify and compare the local regions with sequence similarity. The optimal alignment of the sequences for the comparison can be achieved, as well as manually, using the local homology algorithm of Smith and Waterman (1981, Ad. App. Math. 2: 482), the local homology algorithm of Neddleman and Wunsch (1970, J. Mol. Biol. 48: 443), the similarity search method of Pearson and Lipman (1988, Proc. Natl. Acad. Sci. USA 85: 2444), or information technology software using these algorithms (GAP, BESTFIT, BLAST P, BLAST N, FASTA and TFASTA in the Wisconsin Genetics Software Package, Genetics Computer Group, 575 Science Dr., Madison, Wis.). In order to obtain the optimal alignment, the BLAST program is preferably used, with the BLOSUM 62 matrix. The PAM or PAM250 matrixes can also be used.

[0060] The identity percentage between two nucleic acid or amino acid sequences is determined by comparing these two sequences aligned in an optimal manner in which the nucleic acid or amino acid sequence to be compared can comprise additions or deletions in relation to the reference sequence for an optimal alignment between these two sequences. The identity percentage is calculated by determining the number of identical positions in which the nucleotide or the amino acid residue is identical in the two sequences, by dividing this number of identical positions by the total number of positions compared and multiplying the result obtained by 100 in order to obtain the identity percentage between these two sequences.

[0061] By nucleic sequences having an identity percentage of at least 80%, preferably 85% or 90%, particularly preferably 95% or even 98%, after optimal alignment with a reference sequence, is meant nucleic sequences having, in relation to the reference nucleic sequence, certain modifications such as in particular a deletion, truncation, extension, a chimeric fusion and/or a substitution, in particular punctual, and the nucleic sequence of which has at least 80%, preferably 85%, 90%, 95% or 98%, identity after optimal alignment with the reference nucleic sequence. These are preferably sequences the complementary sequences of which are able to hybridize specifically with the reference sequences. Preferably, the specific or high stringency hybridization conditions are such that they ensure at least 80%, preferably 85%, 90%, 95% or 98% identity after optimal alignment between one of the two sequences and the complementary sequence of the other.

[0062] A hybridization under high stringency conditions means that the temperature and ionic force conditions are chosen so that they allow the hybridization to be maintained between two complementary DNA fragments. By way of example, high stringency conditions of the hybridization stage for the purpose of defining the polynucleotide fragments described above, are advantageously as follows.

[0063] The DNA-DNA or DNA-RNA hybridization is carried out in two stages:(l) prehybridization at 42° C. for 3 hours in phosphate buffer (20 mM, pH 7.5) containing 5×SSC (1×SSC corresponds to a 0.15 M NaCl +0.015 M sodium citrate solution), 50% formamide, 7% sodium dodecyl sulphate (SDS), 10× Denhardt's, 5% dextran sulphate and 1% of salmon sperm DNA; (2) standard hybridization for 20 hours at a temperature dependent on the size of the probe (i.e.: 42° C., for a probe of size >100 nucleotides) followed by 2 20-minute washings at 20° C. in 2×SSC +2% SDS, 1×20-minute washing at 20° C. in 0.1×SSC +0.1% SDS. The last washing is carried out in 0.1×SSC +0.1% SDS for 30 minutes at 60° C. for a probe of size >100 nucleotides. The high stringency hybridization conditions described above for a polynucleotide of a defined size, can be adapted by a person skilled in the art for oligonucleotides of greater or smaller size, according to the teaching of Sambrook et al., (1989, Molecular cloning: a laboratory manual.2nd Ed. Cold Spring Harbor).

[0064] Moreover, by representative fragment of sequences according to the invention, is meant any nucleotide fragment having at least 15 nucleotides, preferably at least 20, 30, 75, 150, 300 and 450 consecutive nucleotides of the sequence from which it originates. In particular a nucleic sequence coding for a biologically active fragment of a polypeptide, such as defined subsequently, in particular of a polypeptide of sequence SEQ ID No. 2 to 527 is meant.

[0065] By representative fragment, is also meant the intergene sequences, and in particular the nucleotide sequences carrying the regulation signals (promoters, terminators, or enhancers etc.).

[0066] Amongst said representative fragments, those are preferred which have the nucleotide sequences corresponding to open reading frames, called ORFs (Open Reading Frame) sequences, generally comprised between a start codon and a stop codon, or between two stop codons, and coding for polypeptides, preferably of at least 30 amino acids, such as for example, non-limitatively, the ORFs sequences which are described below.

[0067] The numbering of nucleotide ORFs sequences which is used subsequently in the present description corresponds to the numbering of the amino acid sequences of the proteins coded by said ORFs.

[0068] Thus, the nucleotide sequences ORF2, ORF3 etc.,ORF526 and ORF527 code respectively for the proteins of amino acid sequences SEQ ID No. 2, SEQ ID No. 3 etc., SEQ ID No. 526 and SEQ ID No. 527 which appear in the list of sequences of the present invention. The detailed nucleotide sequences of the ORF2, ORF3 etc., ORF526 and ORF527 sequences are determined by their respective position on the gene sequence SEQ ID No. 1 of the cyanophage S-2L. Table 1 gives the coordinates of 54 preferred ORFs in relation to the nucleotide sequence SEQ ID No. 1, giving the starting nucleotide, the nucleotide at the end of the ORF, and the reading frame +1,2,3 or −1,2,3 as explained below. The sequence listing shows the reading frame for each of the 526 ORFs identified, numbered ORF2 to ORF527. For perfect concordance between the numbering of the ORF and the SEQ ID in the sequence listing, it was decided to start the ORF at number 2 (thus there is no ORF 1). It is understood that sequence SEQ ID No. 1 is a DNA strand in the 5′-3′ orientation, sequence SEQ ID No. 2 is a protein sequence coded by ORF No. 2. A “positive” frame of +1 corresponds to the reading frame called +1 beginning at nucleotide nt 3 of SEQ ID No. 1 (1^{st} codon of ORF2 situated on this reading frame and beginning at nt 9 of SEQ ID No. 1: TCG which corresponds to serine S; 2^{nd} codon of ORF 2 according to this frame: GAG which corresponds to glutamic acid E). A frame +2 corresponds to the reading frame called +2 beginning at the nucleotide nt 1 of SEQ ID No. 1 (1^{st} codon of ORF 4 situated on this reading frame and beginning at the nt 10 of SEQ ID No. 1: CGG which corresponds to arginine R; 2 codon of ORF 4 according to this frame: AGG which corresponds to arginine R). A frame +3 corresponds to the reading frame called +3 beginning at nucleotide nt 2 of SEQ ID No. 1 (1^{st} codon of ORF 5 situated on this reading frame and beginning at the nt 35 of SEQ ID No. 1: CGT which corresponds to arginine R; 2^{nd} codon of ORF 5 according to this frame: TCA which corresponds to serine S).

[0069] Thus ORF 2 begins at nt No. 9 of SEQ ID No. 1 (i.e. the T-base ) and ends at nt No. 515 (i.e. G-base). ORF 4 begins at nt No. 10 of SEQ ID No.1 (i.e. the T-base) and ends at nt No. 342 (i.e. the G-base). ORF 5 begins at nt No. 35 of SEQ ID No. 1 (i.e. the C-base) and ends at nt No. 280 (i.e. the A-base).

[0070] Conversely, a negative frame corresponds to the antiparallel complementary strand of the positive strand. For example for an ATG sequence on the positive strand in the direction 5′-3′, the sequence on the complementary TAC strand is read CAT. For example for ORF 3 (nt 9 to nt 791), the complementary strand of nucleotides 782 to 791 (CCT CGA TAG) is (GGA GCT ATC) reading in negative direction CTA TCG AGG which corresponds respectively to the amino acids L, S, R.

[0071] The representative fragments according to the invention can be obtained for example by specific amplification such as PCR or after digestion by appropriate restriction enzymes of nucleotide sequences according to the invention, this method being described in particular in the work of Sambrook et al. Said representative fragments can also be obtained by chemical synthesis when their size is not too large, according to methods which are well known to a person skilled in the art.

[0072] Amongst the sequences containing sequences of the invention, or representative fragments, the sequences which are naturally surrounded by sequences which have at least 80%, 85%, 90%, 95% or 98% identity with the sequences according to the invention are also implied.

[0073] By modified nucleotide sequence, is meant any nucleotide sequence obtained by mutagenesis according to techniques well known to a person skilled in the art, and comprising modifications in relation to the normal sequences, for example mutations in the sequences which regulate and/or promote polypeptide expression, in particular leading to a modification of the level of expression or activity of said polypeptide.

[0074] By modified nucleotide sequence, is also meant any nucleotide sequence coding for a modified polypeptide such as defined below.

[0075] The present invention provides all of the nucleotide and polypeptide sequences of the cyanophage S-2L genome. Moreover, it is a subject of the present invention to disclose the functions of these genes and proteins.

[0076] The genes described in the invention were isolated on fragments of DNA using primers taken from the cyanophage S-2L sequence.

[0077] Preferably, the invention relates to a nucleotide sequence characterized in that it codes for a polypeptide of cyanophage S-2L or one of its representative fragments involved in the metabolism of nucleotides, purines, pyrimidines or nucleosides. In this text, the term “representative fragment” for a peptide means a biologically active fragment of this peptide (having an activity of at least 10, 20, 50, 100% of the activity obtained with this peptide).

[0078] In particular the invention relates to a nucleotide sequence characterized in that it codes for a polypeptide of cyanophage S-2L or one of its representative fragments involved in the metabolism of D-base nucleotides, in particular a peptide of sequence SEQ ID No. 175 or one of its representative fragments.

[0079] Preferably, the invention relates to a nucleotide sequence characterized in that it codes for a polypeptide of cyanophage S-2L or one of its representative fragments involved in the replication process, in particular a peptide of sequence SEQ ID No. 14, 18, 142, 355, 429, 454 or one of their representative fragments.

[0080] Preferably, the invention relates to a nucleotide sequence characterized in that it codes for an envelope, in particular a capsid polypeptide, of cyanophage S-2L or one of its representative fragments, in particular a peptide of sequence SEQ ID No. 169, 316, 351, 392, 395, 406, 422, 425 or one of their representative fragments.

[0081] Preferably, the invention relates to a nucleotide sequence according to the invention characterized in that it codes for a polypeptide of cyanophage S-2L or one of its fragments involved in the rerouting of the cell machinery.

[0082] Preferably, the invention relates to a nucleotide sequence according to the invention characterized in that it codes for a polypeptide of cyanophage S-2L or one of its representative fragments involved in the transcription process, in particular a peptide of sequence SEQ ID No. 92, 143, 187, 234 or one of their representative fragments.

[0083] Preferably, the invention relates to a nucleotide sequence according to the invention characterized in that it codes for a polypeptide of cyanophage S-2L or one of its representative fragments involved in the viral virulence process, in particular a peptide of sequence SEQ ID No. 257 or a representative fragment.

[0084] Preferably, the invention relates to a nucleotide sequence according to the invention characterized in that it codes for a polypeptide of cyanophage S-2L or one of its representative fragments involved in the functions relating to transposons in particular a peptide of sequence SEQ ID No. 208 or one of its representative fragments.

[0085] The representative fragments of nucleotide sequences according to the invention can also be probes or primers, which can be used in processes of detection, identification, assay or amplification of nucleic sequences.

[0086] A probe or primer is defined, in the context of the invention, as being a single strand nucleic acid fragment or a denatured double strand fragment comprising for example from 12 bases with several kb, in particular from 15 to several hundred bases, preferably from 15 to 50 or 100 bases, and having a hybridization specificity under determined conditions in order to form a hybridization complex with a target nucleic acid.

[0087] The probes and primers according to the invention can be marked directly or indirectly with a radioactive or non-radioactive compound by methods well known to a person skilled in the art, in order to obtain a detectable and/or quantifiable signal.

[0088] The unmarked sequences of polynucleotides according to the invention can be used directly as a probe or primer.

[0089] The sequences are generally marked in order to obtain sequences which can be used for many applications. The marking of the primers or probes according to the invention is carried out with radioactive elements or with non-radioactive molecules.

[0090] Among the radioactive isotopes used, ³²P, ³³P, ³⁵S, ³H or ¹²⁵I, can be mentioned. The non-radioactive entities are selected from the ligands such as biotin, avidin, streptavidin, dioxigenin, haptens, colourants, luminescent agents such as radioluminescent, chemiluminescent, bioluminescent, fluorescent, phosphorescent agents.

[0091] The polynucleotides according to the invention can thus be used as primer and/or probe in processes using in particular the PCR technique (polymerase chain amnplification) (Rolfs et al.,1991, Berlin: Springer-Verlag). This technique requires the choice of pairs of oligonucleotide primers surrounding the fragment which is to be amplified. Reference can be made, for example, to the technique described in the U.S. Pat. No. 4,683,202. The amplified fragments can be identified, for example after agarose or polyacrylamide gel electrophoresis, or after a chromatographic technique such as filtration on gel or ion-exchange chromatography, then sequenced. The specificity of the amplification can be controlled using as a primer the nucleotide sequences of polynucleotides of the invention as a matrix, plasmids containing these sequences or also the derived amplification products. The amplified nucleotide fragments can be used as reagents in hybridization reactions in order to show the presence, in a biological sample, of a target nucleic acid with a sequence which complements that of said amplified nucleotide fragments.

[0092] The invention is also aimed at the nucleic acids which are able to be obtained by amplification using primers according to the invention.

[0093] Other techniques for the amplification of target nucleic acid can be advantageously used as an alternative to PCR (PCR-like) using primer couples of nucleotide sequences according to the invention. By PCR-like is meant all of the methods using direct or indirect reproductions of the nucleic acid sequences, or in which the marking systems have been amplified, these techniques are of course known, in general these involve amplification of the DNA by a polymerase; when the original sample is an RNA it is advantageous to carry out a reverse transcription in advance. Currently very many processes exist which allow this amplification, such as for example the SDA (Strand Displacement Amplification) technique (Walker et al., 1992, Nucleic Acids Res. 20: 1691), the TAS technique (Transcription-based Amplification System) described by Kwoh et al. (1989, Proc. Natl. Acad. Sci. USA, 86, 1173), the 3SR (Self-Sustained Sequence Replication) technique described by Guatelli et al. (1990, Proc. Natl. Acad. Sci. USA 87: 1874), the NASBA (Nucleic Acid Sequence Based Amplification) technique described by Kievitis et al. (1991, J. Virol. Methods, 35.273), the TMA (Transcription Mediated Amplification) technique, the LCR (Ligase Chain Reaction) technique described by Landegren et al. (1988, Science 241.1077), the RCR (Repair Chain Reaction) technique described by Segev (1992, Kessler C. Springer Verlag, Berlin, New-York, 197-205), the CPR (Cycling Probe Reaction) technique described by Duck et al. (1990, Biotechnics, 9, 142), the Q-beta replicase amplification technique described by Miele et al. (1983, J. Mol. Biol., 171.281). Certain of these techniques have since been perfected.

[0094] In the case where the target polynucleotide to be detected is an mRNA, advantageously, before the implementation of an amplification reaction using the primers according to the invention or before the implementation of a detection process using the probes of the invention, a reverse transcriptase type enzyme in order to obtain a cDNA from the mRNA contained in the biological sample. The cDNA obtained will then serve as a target for the primers or the probes used in the amplification or detection process according to the invention.

[0095] The probe hybridization technique can be carried out in various ways (Matthews et al., 1988, Anal. Biochem., 169, 1-25). The most common method consists of immobilizing the nucleic acid extracted from the cells of different tissues or cells in culture on a support (such as nitrocellulose, nylon, polystyrene) and incubating, in well defined conditions, the target nucleic acid immobilized with the probe. After the hybridization, the probe excess is eliminated and the hybrid molecules formed are detected by an appropriate method (measurement of radioactivity, fluorescence or enzymatic activity linked with the probe).

[0096] According to another mode of application of the nucleic probes according to the invention, the latter can be used as capture probes. In this case, a probe, called a “capture probe”, is immobilized on a support and serves to capture by specific hybridization the target nucleic acid obtained from the biological sample to be tested and the target nucleic acid is then detected with a second probe, called a “detection probe”, marked with an easily detectable element.

[0097] Amongst the interesting fragments of nucleic acid, there must be mentioned in particular the anti-sense oligonucleotides, i.e. the structure of which allows, by hybridization with the target sequence, an inhibition of the expression of the corresponding product. The sense oligonucleotides which, by interaction with proteins involved in the regulation of the expression of the corresponding product, induce either an inhibition, or an activation of this expression must also be mentioned.

[0098] Preferably, the probes or primers according to the invention are immobilized on a support, covalently or non-covalently. In particular, the support can be a DNA chip or a high density filter, which are also subjects of the present invention.

[0099] By DNA chip or high density filter is meant a support on which DNA sequences are fixed, each of them being able to be located by its geographical location. These chips or filters differ mainly in their size, the support material, and optionally the number of DNA sequences which are fixed to it.

[0100] The probes or primers according to the present invention can be fixed on solid supports, in particular DNA chips, by different production processes. In particular, a synthesis in situ can be carried out by photochemical orientation or by ink-jet. Other techniques consist of carrying out a synthesis ex situ and fixing the probes onto the DNA chip support by mechanical, electronic or ink-jet orientation. These different processes are known to a person skilled in the art.

[0101] A nucleotide sequence (probe or primer) according to the invention thus allows the detection and/or the amplification of specific nucleic sequences. In particular, the detection of said sequences is facilitated when the probe is fixed on a DNA chip, or to a high density filter.

[0102] The use of DNA chips or high density filters in fact allows determination of the expression of genes in an organism having a gene sequence close to cyanophage S-2L.

[0103] The gene sequence of cyanophage S-2L, containing the identification of all of the genes of this organism, as presented in the present invention, serves as a basis for the construction of these DNA chips or filters.

[0104] The preparation of these filters or chips consists of synthesizing oligonucleotides, corresponding to the 5′ and 3′ ends of the genes. These oligonucleotides are chosen using the gene sequence and its annotations disclosed by the present invention. The pairing temperature of these oligonucleotides at the corresponding places on the DNA must be approximately the same for each oligonucleotide. This allows the preparation of DNA fragments corresponding to each gene by using appropriate PCR conditions in a highly automated environment. The amplified fragments are then immobilized on filters or supports made of glass, silicon or synthetic polymers and these media are used for the hybridization.

[0105] The availability of such filters and/or chips and of the corresponding annotated gene sequence allows the study of the expression of large groups, or even of all the genes in viruses close to cyanophage S-2L, by preparing the complementary DNAs, and by hybridizing them with the DNA or with the oligonucleotides immobilized on the filters or chips. Also, the filters and/or the chips allow the study of the variability of the strains by preparing the DNA of these viruses and by hybridizing them with the DNA or with the oligonucleotides immobilized on the filters or the chips.

[0106] The differences between the gene sequences of the different strains or species can greatly affect the intensity of the hybridization and, consequently, influence the interpretation of the results. It can therefore be necessary to have the exact sequence of the genes of the strain which is to be studied.

[0107] The use of high density filters and/or chips allows new knowledge to be obtained about the regulation of genes in organisms which are important in industry, and in particular recombinant bacteria incorporating genes of cyanophage S-2L propagated in diverse conditions. It also allows a rapid identification of the differences between the genomes of the strains used in various industrial applications.

[0108] Moreover, the DNA chips or the filters according to the invention, containing specific probes or primers of cyanophage S-2L, are very advantageous elements of kits or are necessary for the detection and/or the quantification of the expression of genes of cyanophage S-2L in recombinant bacteria integrating these genes.

[0109] In fact the control of gene expression is a critical point for the metabolic routes of cyanophage S-2L, either allowing the expression of one or more new genes, or modifying the expression of genes already present in the cell. The present invention provides the group of sequences naturally active in cyanophage S-2L allowing gene expression. It thus allows the determination of the group of sequences expressed in cyanophage S-2L. It also provides a tool which allows the locating of genes the expression of which follows a given pattern. For this purpose, the DNA of all or some of the genes of cyanophage S-2L can be amplified using primers according to the invention, then fixed to a support such as for example glass or nylon or a DNA chip, in order to create a tool which allows the expression profile of these genes to be studied. This tool, constituted by this support containing the coding sequences serves as a hybridization matrix for a mixture of marked molecules reflecting the messenger RNAs expressed in the cell (in particular the marked probes according to the invention). By repeating this experiment at different times and combining all of this data using appropriate processing, the expression profiles of all of these genes are then obtained. Knowledge of the sequences which follow a given regulation pattern can also be useful for researching in a targeted manner, for example by homology, other sequences which follow the same regulation pattern overall, but in a slightly different way. In addition, it is possible to isolate each control sequence present upstream of the segments which act as probes and to monitor their activity using appropriate means such as a reporter gene (luciferase, 6-galactosidase, GFP). These isolated sequences can then be modified and assembled by metabolic engineering with sequences which are of interest because of their optimal expression.

[0110] The present invention provides the list of genes coding or able to code for proteins regulating the transcription of the genes of cyanophage S-2L. Modifying the structure or the integrity of these genes can allow modification of the expression of the target genes controlled by target promoters of these regulators. The information given also allows a person skilled in the art to choose the appropriate regulator or regulators for the desired application as well as their target, which allows optimization of the expression of genes which are of interest. The use of the tools previously described as DNA chips, also allows all of the genes the regulation of which is modified by this inactivation to be located. It is thus possible to select a control sequence group corresponding, as closely as possible, to the same type of regulation. These sequences can then be used to control the expression of genes which are of interest.

[0111] According to another aspect, the invention relates to polypeptides comprising:
[0112] a) a polypeptide encoded by a nucleotide sequence according to the invention as defined previously, in particular a polypeptide encoded by an ORF;
[0113] b) a polypeptide having at least 80% preferably 85%, 90%, 95% and 98% identity with a polypeptide from a);
[0114] c) a biologically active fragment with at least 5, 7, 10 amino acids of a polypeptide according to a) or b);
[0115] d) a polypeptide modified with a polypeptide according to the invention, or as defined in a), b), or c).
   The invention preferably relates to:
[0116] a) the polypeptides of cyanophage S-2L of sequences SEQ ID No. 2 to SEQ ID No. 527, encoded respectively by ORFs 2 to 527,
[0117] b) the 54 polypeptides mentioned in Table 1 (SEQ ID No. 14, 18, 26, 68, 86, 92, 105, 109, 134, 142, 143, 148, 152, 169, 175, 187, 208, 211, 234, 246, 250, 257, 264, 286, 298, 316, 332, 342, 347, 348, 351, 355, 364, 365, 369, 370, 392, 395, 406, 418, 422, 425, 429, 432, 433, 454, 464, 466, 472, 484, 489, 494, 500.
[0118] c) the 14 polypeptides of cyanophage S-2L, shown in Table 1 as having a very significant homology, of sequence SEQ ID No. 86, 92, 152, 175, 234, 257, 298, 316, 395, 406, 425, 484.
   The invention also relates to:
[0119] d) the polypeptides having at least 80% preferably 85%, 90%, 95% and 98% identity with a polypeptide from a), b), c)
[0120] e) the biologically active fragments of the polypeptides from a), b), c), d)
[0121] f) the modified polypeptides from a), b), c), d), e).

[0122] Of course the invention relates in particular to the polypeptides involved in the biosynthesis of the D-bases and metabolic intermediates of this biosynthesis, in particular the peptide of sequence SEQ ID No. 175 with succinylate synthetase activity.

[0123] The phages the modifications of which are prereplicative, which is probably the case for cyanophage S-2Ls, have the coding sequences of proteins which are required for the biosynthesis of the modified bases, in the present case of the D-bases. Moreover, in as far as the D-bases are a part of the genome of cyanophage, the polymerase enzymes in particular DNA polymerase must be capable of having the D-base specifically as substrate instead of the A-base. The DNA polymerase of cyanophage S-2L is thus capable of distinguishing dDTP from dATP. Similarly, the transcription depends on a specific RNA polymerase and/or a specific sigma factor. Thus the invention relates, according to a preferred embodiment, to the specific polypeptides with DNA polymerase, RNA polymerase activity and related factors, in particular the peptides of sequence SEQ ID No. 92 and SEQ ID No. 234 which have specific activities of transcription of DNA comprising D-bases.

[0124] In the present description, the terms polypeptides, polypeptide sequences, peptides and proteins are interchangeable.

[0125] It must be understood that the invention does not relate to polypeptides in natural form, that is to say that they are not in their natural environment but that they have been able to be isolated or obtained by purification from natural sources, or obtained by genetic recombination, or by chemical synthesis, and that they can then comprise unnatural amino acids such as will be described subsequently.

[0126] By polypeptide having a certain identity percentage with another, which is also called an homologous polypeptide, is meant the polypeptides having certain modifications in relation to the natural polypeptides, in particular a deletion, addition or substitution of at least one amino acid, a truncation, an extension, a chimeric solution and/or a mutation, or the polypeptides having post-translational modifications. Among the homologous polypeptides, those the amino acid sequence of which has at least 80%, preferably 85%, 90%, 95% and 98% homology with the amino acid sequences of the polypeptides according to the invention are preferred. In the case of a substitution, one or more consecutive or non-consecutive amino acid(s) are replaced with “equivalent” amino acids. The expression “equivalent amino acids” here is meant to designate any amino acid which is capable of being substituted for one of the amino acids of the base structure without however essentially modifying the biological activities of the corresponding peptides as defined subsequently.

[0127] These equivalent amino acids can be determined either on the basis of their homology of structure with the amino acids for which they are substituted, or on results of biological activity comparison tests of which can be carried out between the different polypeptides.

[0128] By way of an example, the substitution possibilities which can be carried out without resulting in a great modification of the biological activity of the corresponding modified polypeptide are mentioned. Thus leucine can be replaced by valine or isoleucine, aspartic acid by glutamine acid, glutamine by asparagine, arginine by lysine, etc. the reverse substitutions being naturally envisageable under the same conditions.

[0129] The homologous polypeptides also correspond to the polypeptides encoded by the homologous or identical nucleotide sequences, as defined previously and thus include in the present definition polypeptides which are mutated or which correspond to variations between or within species, being able to exist in cyanophage S-2L, and which correspond in particular to truncations, substitutions, deletions and/or additions, of at least one amino acid residue.

[0130] It is understood that the identity percentage between two polypeptides is calculated in the same way as between two nucleic acid sequences. Thus, the identity percentage between two polypeptides is calculated after optimal alignment of these two sequences, on a maximum homology window. In order to define said maximum homology window, the same algorithms can be used as for the nucleic acid sequences.

[0131] By biologically active fragment of a polypeptide according to the invention, is meant in particular a polypeptide fragment comprising at least 5 amino acids, preferably at least 7, 10, 15, 25, 50, 75, 100, 150, 200, 250, 300 amino acids, having at least one of the biological characteristics of the polypeptides according to the invention, in particular in that it is generally capable of carrying out even a partial activity, such as for example:
[0132] an (metabolic) enzyme activity or an activity which can be involved in the biosynthesis or biodegradation of organic or inorganic compounds;
[0133] a structural activity (cell envelope etc.);
[0134] an activity in the process of replication, amplification, preparation, transcription, translation or processing, in particular of DNA, RNA or proteins
[0135] and quite particularly an activity involved in the biosynthesis of D-bases.

[0136] The polypeptide fragments can correspond to isolated or purified fragments naturally present in the strains of cyanophage S-2L, or to fragments which can be obtained by cleavage of said polypeptide by a proteolytic enzyme such as trypsin or chymotrypsin or collagenase, by a chemical reagent (cyanogen bromide, CNBr) or by placing said polypeptide in a very acidic environment (for example at pH=2.5). Polypeptide fragments can also be prepared by chemical synthesis, from hosts transformed by an expression vector according to the invention which contain a nucleic acid allowing the expression of said fragment, and placed under the control of the appropriate regulation and/or expression elements.

[0137] By “modified polypeptide” of a polypeptide according to the invention, is meant a polypeptide obtained by genetic recombination or by chemical synthesis such as described subsequently, which has at least one modification in relation to the normal sequence. These modifications can in particular be carried on amino acids necessary for the specificity or efficiency of the activity, or at the origin of the structural conformation, the charge, or the hydrophobicity of the polypeptide according to the invention. Thus polypeptides with equivalent, increased or reduced activity, or with equivalent, narrower or wider specificity can be created. Amongst the modified polypeptides, the polypeptides in which up to five amino acids can be modified, truncated at the N or C terminal end, or deleted, or added should be mentioned.

[0138] As is shown, the modifications of a polypeptide are aimed in particular at:
[0139] allowing its use in biosynthesis or biodegradation processes of organic or inorganic compounds,
[0140] allowing its use in replication, amplification, repair and transcription regulation, translation, or maturation processes in particular of DNA, RNA, or proteins,
[0141] allowing its improved secretion,
[0142] modifying its solubility, the efficiency or specificity of its activity, or also facilitating its purification.

[0143] The chemical synthesis also has the advantage of being able to use unnatural amino acids or non-peptide bonds. Thus, it can be advantageous to use unnatural amino acids, for example in D form, or amino acid analogues, in particular sulphurized forms.

[0144] In another feature, preferably, the subject of the invention is a polypeptide according to the invention, characterized in that it is a polypeptide of cyanophage S-2L or one of its representative fragments involved in the metabolism of nucleotides, purines, pyrimidines or nucleosides.

[0145] In another feature, preferably, a subject of the invention is a polypeptide according to the invention, characterized in that it is a polypeptide of cyanophage S-2L or one of its representative fragments involved in the replication process , and in that it is chosen from the polypeptides of sequence SEQ ID No. 14, 18, 142, 355, 429, 454 and one of their fragments.

[0146] The invention very advantageously relates to polypeptides of cyanophage S-2L with at least 7 amino acids and having an adenylosuccinate synthetase activity. Preferably, such fragments include the GSTGKG unit. Moreover biological results (specific metabolism of cyanophage S-2L capable of synthesizing and polymerizing DNA incorporating D-bases), the inventors in fact identified consensus sites in particular the zones which are the phosphate and IMP binding sites. In particular the fragment QYGSTGKG is found, which is close to the Prosite signature QWGDEGKG attributed to adenylosuccinate synthetase, or the fragment GSTGKG close to the fragment GDEGKG which is common to Escherichia coli, Methanobacterium thermoautotrophicum, Pyrococcus horikoshii OT3. The inventors identified significant homologies for adenylosuccinate synthetase, helicase, sigma factor activities, these three activities being a priori closely and directly linked with the specific metabolism of the D-bases.

[0147] In another feature, preferably, a subject of the invention is a polypeptide according to the invention, characterized in that it is a polypeptide of cyanophage S-2L or one of its fragments involved in the transcription process, and in that it is chosen from the polypeptides of sequence SEQ ID No. 92, 143, 187 and one of their representative fragments.

[0148] In another aspect, preferably, a subject of the invention is a polypeptide according to the invention, characterized in that it is an envelope polypeptide of cyanophage S-2L or one of its fragments, and in that it is chosen from the polypeptides corresponding to ORFs 169, 316, 351, 392, 395, 406, 422, 425 and one of their representative fragments.

[0149] In another feature, preferably, a subject of the invention is a polypeptide according to the invention, characterized in that it is a polypeptide of cyanophage S-2L or one of its representative fragments involved in the rerouting of the cell machinery or in the intermediate metabolism.

[0150] In another feature, preferably, a subject of the invention is a polypeptide according to the invention, characterized in that it is a polypeptide of cyanophage S-2L or one of its representative fragments involved in the virulence process, in particular the polypeptide of sequence SEQ ID No. 247 and one of its representative fragments.

[0151] In another aspect, preferably, a subject of the invention is a polypeptide according to the invention, characterized in that it is a polypeptide of cyanophage S-2L or one of its fragments involved in the functions relating to transposons, in particular the polypeptide of sequence SEQ ID No. 208 and one of its representative fragments.

[0152] However it must be noted that a living organism is a whole and must be treated as such. Thus, in order to be able to develop and exhibit its properties, any organism requires interactions between the different metabolic routes. Thus, the classification given above must not be considered as being limitative, a gene being able to be involved in several distinct metabolic routes.

[0153] A subject of the present invention is also the nucleotide and/or polypeptide sequences according to the invention, characterized in that said sequences are recorded on a recording medium, the form and nature of which facilitate the reading, analysis and/or exploitation of said sequence or sequences. These media can also contain other information extracted from the present invention, in particular analogies with the sequences which are already known, as mentioned in Table 1 and/or information relating to the nucleotide and/or polypeptide sequences of other microorganisms in order to facilitate the comparative analysis and exploitation of the results obtained.

[0154] Amongst said recording media, the media which are readable by a computer, such as the magnetic, optical, electrical or hybrid media, in particular floppy disks, CD-ROMs, servers are preferred. Such recording media are also a subject of the invention.

[0155] The recording media according to the invention, with the information provided, are very useful for choosing nucleotide primers or probes for determining the genes in cyanophage S-2L or strains close to this organism. Similarly, the use of these media for the study of genetic polymorphism of a strain close to cyanophage S-2L, in particular by determining the colinearity regions, is very useful in that these media provide not only the nucleotide sequence of the genome of cyanophage S-2L, but also the genome organization in said sequence. Thus, the uses of recording media according to the invention are also subjects of the invention.

[0156] A process for studying the genetic polymorphism between the strains close to cyanophage S-2L, by determining the colinearity regions, can comprise the stages of
[0157] fragmentation of the chromosomal DNA of said other strain (sonication, digestion),
[0158] sequencing of the DNA fragments,
[0159] analysis of homology with the genome of cyanophage S-2L (SEQ ID No. 1).

[0160] This process which comprises a stage of analysis of homology with the genome of cyanophage S-2L, in particular using a recording medium, is also a subject of the invention.

[0161] The analysis of homology between different sequences is advantageously carried out using sequence comparison software, such as Blast software, or the GCG software package, described previously.

[0162] The invention is also aimed at a nucleotide sequence such as described previously, immobilized on a support, covalently or non-covalently, in particular a high density filter or a DNA chip.

[0163] The invention is also aimed at a nucleotide sequence such as described previously for the detection and/or amplification of nucleic sequences.

[0164] According to one embodiment such a detection and amplification process comprises for example the following stages:
[0165] a) optionally, isolation of the DNA from the biological sample to be analyzed, or obtaining of an cDNA from the RNA of the biological sample;
[0166] b) specific amplification of the DNA of cyanophages S-2L using at least one primer according to the invention;
[0167] c) revealing the amplification products.

[0168] This process is based on the specific amplification of DNA, in particular by a chain reaction amplification.

[0169] A process comprising the following stages is also preferred:
[0170] a) bringing a nucleotide probe according to the invention into contact with a biological sample, the nucleic acid contained in the biological sample having, if appropriate, previously been made accessible for hybridization, under conditions which allow the hybridization of the probe with the nucleic acid of cyanophage S-2L;
[0171] b) revealing the hybrid optionally formed between the nucleotide probe and the DNA of the biological sample.

[0172] Such a process should not be limited to the detection of the presence of DNA contained in the verified biological sample, it can also used to detect the RNA contained in said sample. This process includes in particular Southern and Northern blots.

[0173] Thus, the present invention also includes a kit or set for the detection and/or identification of cyanophage S-2L, characterized in that it comprises the following elements:
[0174] a) a nucleotide probe according to the invention;
[0175] b) optionally, the reagents necessary for implementing a hybridization reaction;
[0176] c) optionally, at least one primer according to the invention as well as the reagents required for a DNA amplification reaction.

[0177] Similarly, the present invention also includes the kits or sets for the detection and/or identification of cyanophage S-2L, comprising the following elements:
[0178] a) a nucleotide probe, called a capture probe, according to the invention;
[0179] b) an oligonucleotide probe, called a revelation probe, according to the invention;
[0180] c) optionally, at least one primer according to the invention as well as the reagents required for a DNA amplification reaction.

[0181] The invention is also aimed at the cloning and/or expression vectors, which contain a nucleotide sequence according to the invention. The nucleotide sequences coding for polypeptides involved in the metabolism of nucleotides, purines, pyrimidines or nucleosides are in particular preferred.

[0182] The vectors according to the invention preferably comprise elements which allow the expression and/or secretion of nucleotide sequences in a determined host cell.

[0183] The vector must then comprise a promoter, translation initiation and termination signals, as well as appropriate regions of transcription regulation. It must be able to be maintained in a stable manner in the host cell and can optionally have particular signals which specify the secretion of the translated protein. These different elements are chosen and optimized by a person skilled in the art according to the host cell used. For this purpose, the nucleotide sequences according to the invention can be inserted into vectors with autonomous replication inside the chosen host, or be vectors which integrate into the chosen host.

[0184] Such vectors are prepared by methods commonly used by a person skilled in the art, and the resulting clones can be introduced into an appropriate host by means of standard methods, such as lipofection, electroporation, thermal shock, or chemical methods.

[0185] The vectors according to the invention are for example vectors of plasmid or viral origin. They are useful for transforming host cells in order to clone or express the nucleotide sequences according to the invention. The cyanophage S-2L itself can be used directly as vector.

[0186] The invention also comprises the host cells transformed by a vector according to the invention.

[0187] The host cell can be chosen from prokaryotic or eukaryotic systems, for example bacteria cells but also yeast cells or animal cells, in particular mammal cells. Insect cells or plant cells can also be used. The host cells preferred according to the invention are in particular prokaryotic cells. The cells which are transformed according to the invention can be used in recombinant polypeptide preparation processes according to the invention.

[0188] The processes for preparing a polypeptide which is of interest according to the invention in recombinant form, outside the natural environment, characterized in that they use a vector and/or a cell transformed by a vector according to the invention are themselves included in the present invention. The use of cyanophage S-2L for the production of such peptides is thus also a part of the invention.

[0189] Preferably, a cell transformed by a vector according to the invention is cultured under conditions which allow the expression of said polypeptide of interest and said recombinant peptide is recovered. The host cells according to the invention can also be used for the preparation of dietary compositions, which are themselves a subject of the present invention.

[0190] Such a process for obtaining proteins of interest of cyanophage S-2L comprises according to one embodiment the insertion of genes of interest of the genome of S-2L phage, typically by ligation, into cloning and expression vectors, under conditions which allow their expression by the replication machinery taking charge of a host organism such as E. coli, and the extraction of the proteins produced.

[0191] The hereditary messages of the phage recopied in the form of canonical DNA are able to express themselves as cyanobacteria genes. The messenger RNAs emitted after rewriting of the DNA of S-2L in E. coli are translated into proteins identical to those produced when infecting Synechococcus with S-2L.

[0192] According to a preferred embodiment the polypeptides of interest are proteins involved in the metabolism of D-bases, in particular succinyladenylate synthetase.

[0193] It was stated above that a D-base is probably formed by pre-replicative modification and that cellular genes were recruited for this purpose, two biosynthesis routes presenting themselves to form dDTP from a canonic deoxynucleotide, dAMP or dGMP.

[0194] According to the first route (FIG. 2a), the activated monomer dATP is firstly hydrolyzed to dAMP by an enzyme of the type coded by DUT in E. coli (9) or from the product of the mutT gene (9), which has the twofold effect of blocking access of dATP to DNA synthesis and providing the precursor of DMP. The biosynthesis of the latter is carried out following the two successive reactions converting IMP into GMP in the cell metabolism (9); the nucleotide is finally activated in DDTP in two phosphorylation stages.

[0195] According to the second route (FIG. 2b), dDMP is obtained by applying to dGMP the two reactions converting IMP into AMP in the cells (9). If it also takes dATP as precursor, this second route is longer since dGMP must previously be synthesized via dIMP. All along this second route, three specific and mutagenic dNTPs are formed (dIMP, dXMP and dSMP), compared with just one (diGMP) in the first (FIG. 2a).

[0196] As is described subsequently the inventors have succeeded in identifying an ORF coding for an enzyme of the second route, succinyladenylate synthetase.

[0197] According to another preferred embodiment, the polypeptides of interest are polymerases of cyanophages S-2L, capable of polymerizing D-bases, which allows the propagation of the nucleic acids incorporating D-bases in vitro and in vivo.

[0198] The inventors obtain in particular DNA polymerases which are peculiar to the duplex with high stability and unable to replicate dA taken as a constituent of the matrix or as triphosphate monomer. These DNA polymerases are typically obtained by a process comprising a stage of expression, outside the natural environment, of the gene of said DNA polymerase in recombinant bacteria.

[0199] According to a preferred embodiment the polypeptides of interest are polypeptides which are capable of modifying the transcription of the DNA of host cells of cyanophage S-2L.

[0200] In fact the custom-made transcription of the genome of S-2L of an RNA polymerase, even if it is not coded in the phage. It is known that T4 enzymes alter the RNA polymerase of E. coli. The promoters present in the genome of S-2L deviate from the consensus known to a person skilled in the art (TATA box in particular). It is probable that transcription initiation factors (sigma etc.) will be coded or modified by the phage, or even that they will be taken into the capsid to allow the start of the viral program. Whatever the case, the sequencing carried out by the inventors allows identification without excessive effort of certain genes of S-2L which are responsible for the control of the transcription by chemical alteration of DNA.

[0201] As has been stated, the host cell can be chosen from prokaryotic or eukaryotic systems. In particular, it is possible to identify nucleotide sequences according to the invention, which facilitate secretion in such a prokaryotic or eukaryotic system. A vector according to the invention carrying such a sequence can thus be advantageously used for the production of recombinant proteins, which are designed to be secreted. The purification of these recombinant proteins of interest is facilitated by the fact that they are present in the supernatant of the cellular culture rather than inside host cells.

[0202] The polypeptides according to the invention can also be prepared by chemical synthesis. Such a preparation process is also a subject of the invention. A person skilled in the art knows the chemical synthesis processes, for example the techniques using solid phases (see in particular Steward et al., 1984, Solid phase peptides synthesis, Pierce Chem. Company, Rockford, 111, 2nd ed., (1984)) or techniques using partial solid phases, by fragment condensation or by a synthesis in standard solution. The polypeptides obtained by chemical synthesis and which are able to comprise corresponding unnatural amino acids are also included in the invention.

[0203] The invention also includes the hybrid polypeptides which include at least the sequence of one polypeptide according to the invention, and the sequence of a polypeptide which is able to induce an immune response in a human or animal. The invention also comprises the nucleotide sequences which code for such hybrid polypeptides, or the vectors which contain these nucleotide sequences. This coupling between a polypeptide according to the invention and an immunogenic polypeptide of interest, can be carried out by chemical route, or by biological route. Thus, according to the invention, it is possible to introduce one or more bonding element(s), in particular amino acids, in order to facilitate the coupling reactions between the polypeptide according to the invention, and the immunostimulation polypeptide, the covalent coupling of the immunostimulation antigen being able to be carried out at the N or C-terminal end of the polypeptide according to the invention. The bifunctional reagents which allow this coupling are determined according to the end chosen for carrying out this coupling, and the coupling techniques are well known to a person skilled in the art.

[0204] The conjugates produced by a coupling of peptides can also be prepared by genetic recombination. The hybrid peptide (conjugated) can in fact be produced by recombinant DNA techniques, by insertion or addition to the DNA sequence coding for the polypeptide according to the invention, of a sequence coding for the antigen, immunogen or hapten peptide or peptides. These techniques for the preparation of hybrid peptides by genetic recombination are well known to a person skilled in the art (see for example Makrides, 1996, Microbiological Reviews 60.512-538).

[0205] Preferably, said immunitary polypeptide is chosen from the group of peptides containing the toxoids, in particular diphteria toxoid or tetanus toxoid, the proteins derived from Streptococcus (such as the protein bonding with human blood albumin), the membrane OmpA proteins and the outer membrane protein complexes, the vesicles of outer membranes or heat-shock proteins.

[0206] The nucleotide and vector sequences, coding for a hybrid polypeptide according to the invention are also a subject of the invention.

[0207] The hybrid polypeptides according to the invention are very useful for obtaining monoclonal or polyclonal antibodies, which are capable of specifically recognizing the polypeptides according to the invention. In fact a hybrid polypeptide according to the invention allows potentiation of the immune response, against the polypeptide according to the invention coupled with the immunogenic molecule. Such monoclonal or polyclonal antibodies, their fragments, or the chimeric antibodies, recognizing the polypeptides according to the invention, are also subjects of the invention.

[0208] The specific monoclonal antibodies can be obtained according to the standard method of hybridoma culture described by Köhler and Milstein (1975, Nature 256, 495).

[0209] The antibodies according to the invention are for example chimeric antibodies, humanized antibodies, Fab, or F(ab′)² fragments. They can also be presented in the form of an immunoconjugate or marked antibodies in order to obtain a detectable and/or quantifiable signal.

[0210] The antibodies according to the present invention can in particular be used in order to detect an expression of a gene of cyanophage S-2L. In fact the presence of the expression product of a gene recognized by a specific antibody of said expression product can be detected by the presence of an antigen-antibody complex formed after bringing into contact a recombinant bacterium expressing a given gene of interest of cyanophage S-2L and an antibody according to the invention. The bacterial strain used can have been “prepared”, i.e. centrifuged, lysed, placed in an appropriate reagent for the constitution of the medium which is conducive to the immunological reaction. In particular, a process for the detection of the expression of a gene, corresponding to a Western blot, which can be carried out after polyacrylamide gel electrophoresis of a lysate of the bacterial strain, in the presence or in the absence of reducing conditions (SDS-PAGE). After migration and separation of the proteins on the polyacrylamide gel, said proteins are transferred onto an appropriate membrane (for example nylon) and the presence of the protein or the polypeptide of interest is detected, by bringing into contact said membrane and an antibody according to the invention.

[0211] The polypeptides and the antibodies according to the invention can advantageously be immobilized on a support, in particular a protein chip. Such a protein chip is a subject of the invention, and can also contain at least one polypeptide of a microorganism other than cyanophage S-2L or an antibody directed against a compound of a microorganism other than cyanophage S-2L. The protein chips or high density filters containing proteins according to the invention can be created in the same way as the DNA chips according to the invention. In practice, the synthesis of the polypeptides fixed directly onto the protein chip can be carried out, or a synthesis can be carried out ex situ followed by a stage of fixation of the synthesized polypeptide onto said chip. The latter method is preferable, when large proteins, which are advantageously prepared by genetic engineering, are to be fixed onto the support. However, if only peptides are to be fixed onto the support of said chip, it can be more advantageous to proceed to synthesizing said peptides directly in situ.

[0212] Preferably, an antibody according to the invention is fixed onto the support of the protein chip, and the presence of the corresponding antigen, specific to cyanophage S-2L or a related microorganism is detected.

[0213] A protein chip described above can be used for the detection of gene products, in order to establish an expression profile of said genes, complementing a DNA chip according to the invention.

[0214] The protein chips according to the invention are also extremely useful for proteomics testing, which studies the interactions between the different proteins of a given microorganism. In a simplified manner, representative peptides of the different proteins of an organism are fixed onto a support. Then said support is brought into contact with marked proteins, and after an optional stage of rinsing, interactions between said marked proteins and the peptides fixed on the protein chip are detected.

[0215] Thus, the protein chips comprising a polypeptide sequence according to the invention or an antibody according to the invention are a subject of the invention, as well as the kits or sets containing them.

[0216] Preferably, the primers and/or probes and/or polypeptides and/or antibodies according to the present invention used in processes according to the present invention are chosen from the specific primers and/or probes and/or polypeptides and/or antibodies of cyanophage S-2L.

[0217] A subject of the present invention is also the strains of cyanophage S-2L and/or of related microorganisms containing one or more mutation(s) in a nucleotide sequence according to the invention, in particular an ORF sequence, or their regulating elements (in particular promoters).

[0218] According to the present invention, the strains of cyanophage S-2L having one or more mutation(s) in the nucleotide sequences coding for polypeptides involved in the metabolism of the D-bases, replication and transcription are preferred.

[0219] Said mutations can lead to an inactivation of the gene, or in particular when they are situated in the regulating elements of said gene, to its overexpression.

[0220] Thus, strains of cyanophage S-2L which overexpress a polypeptide according to the invention are sought in particular, involved in the functions relating to the synthesis of D-bases or of polynucleotides incorporating at least one D-base.

[0221] The prior art displays knowledge of the specific metabolism of cyanophage S-2L, leading to the synthesis of D-bases instead of A-bases. However, until now, without knowing the exact sequence of cyanophage S-2L, a person skilled in the art did not have at his disposal the ORF coding sequences and therefore could not in particular efficiently clone a given ORF sequence, test the corresponding biological activity and express polypeptides of interest. This type of process is now possible thanks to the sequencing of the genome of cyanophage S-2L which was carried out by the inventors.

[0222] Even without knowing precisely at this stage the synthesis route of the D-bases, the inventors have succeeded in identifying coding sequences involved in this metabolic route. By successive testing, but without excessive effort for a person skilled in the art, of the biological function of the ORF capable of intervening in this metabolic route from the results obtained (more specifically the ORFs of the polypeptides group intervening in the metabolism of nucleotides, purines, pyrimidines or nucleosides), the inventors can thus locate those which code for the proteins determining this route.

[0223] According to another feature the invention also relates to the use of the polypeptide sequences as described previously for the production of D-bases and/or polynucleotide sequences comprising D-bases. These polynucleotide sequences are in particular DNA or RNA sequences, in particular mRNA.

[0224] According to another feature the invention relates to a process for obtaining D-bases and/or polynucleotides of interest comprising at least one D-base, said process comprising the culture of a microorganism containing at least one nucleotide sequence of cyanophage S-2L coding for at least one polypeptide involved in the synthesis of D-bases, under appropriate conditions for the development of the vector and the synthesis of D-bases. Typically the microorganism cultured comprises a vector as described previously containing said nucleotide coding sequence or sequences of cyanophage S-2L.

[0225] According to one embodiment such a process comprises:
[0226] the addition to a medium comprising the substrates required for obtaining D-bases, of an extract or mixture of extracts of recombinant bacteria expressing at least one gene of cyanophage S-2L involved in the synthesis of D-bases
[0227] if appropriate the extraction of D-bases and/or said polynucleotides of interest.

[0228] According to one embodiment such a process comprises:
[0229] the preparation of at least one DNA sequence coding for a polypeptide capable of provoking the synthesis of at least one D-base in a host microorganism
[0230] the cloning of said coding sequence in a vector which is capable of being transferred into and replicating in said host microorganism, this vector comprising the elements necessary for the expression of said coding sequence
[0231] the transfer of the vector comprising said coding sequence into a microorganism capable of producing the enzymes of the D-base synthesis directed by said coding sequence
[0232] the culture of the microorganism under appropriate conditions for the development of the vector and the synthesis of the D-bases
[0233] if appropriate the extraction of D-bases and/or of said polynucleotides of interest.

[0234] As is described subsequently, the inventors have succeeded in cloning DNA containing D-bases, using restriction enzymes the restriction sites of which do not have an A-base, in particular SmaI (site CCCGGG), SacII (site CCGCGG), MspI (site CCGG), BspRI (site GGCC). The inventors have shown that restriction enzymes comprising at least one A-base do not hydrolyze the DNA of S-2L: BamHI (GCATCC), EcoRI (GAATTC), HindIII (AAGCTT), Sau3AI (GATC). For this purpose the inventors challenged a technical assumption, namely that the cloning of a DNA comprising D-bases could lead to ambiguities in copying during cloning. In fact, as shown in FIG. 4, the cloning of “D DNA” in E. Coli, is capable of leading to sequences which are different from those produced by the cloning of “A DNA”.

[0235] According to another feature the invention relates to a process for obtaining D-bases and/or polynucleotides of interest comprising at least one D-base, said process comprising:
[0236] the addition, to a medium comprising the substrates required for obtaining D-bases, of the expression product of at least one gene of cyanophage S-2L involved in the synthesis of D-bases, in order to produce D-bases and/or polynucleotides of interest comprising at least one D-base
[0237] if appropriate the extraction of the D-bases and/or said polynucleotides of interest.

[0238] In the processes mentioned above, by synthesis of D-bases and/or polynucleotides comprising at least one D-base, is meant that the conditions of the synthesis are such that only or essentially D-bases, or only or essentially polynucleotides comprising at least one D-base, or at the same time D-bases and polynucleotides comprising at least one D-base are obtained in desired quantities. The quantities of D-bases and polynucleotides comprising at least one D-base produced depend in particular on the control of the expression of proteins involved in the syntheses of the D-bases and in the incorporation of the D-bases during the extension of the polynucleotide chains.

[0239] According to another feature the invention relates to a process for obtaining polynucleotides of interest comprising at least one D-base, said process comprising the culture of a microorganism containing at least one nucleotide sequence of cyanophage S-2L coding for at least one polypeptide involved in the extension of said polynucleotides with incorporation of D-bases, DNA polymerase in particular, in appropriate conditions for the development of the vector and the extension of said polynucleotides.

[0240] According to another feature the invention relates to the use of cyanophage S-2L for the production of reagents which are useful for PCR or PCR-like reactions involving D-bases. In particular according to a preferred embodiment these reagents are dDTP monomers.

[0241] The dDTP monomer is a good substrate of the DNA polymerases of cyanophage S-2L, and matrices comprising the D-base are efficiently replicated (1). The biotechnological production of dD, dDMP and dDTP thus applies to the PCR techniques, increasing the thermal stability of the duplexes, or masking and unmasking many restriction sites (10). It is understood that this production is not a production in the natural environment, production in the natural environment meaning production by the cyanophage S-2L itself.

[0242] The invention also relates to a process for the production of polynucleotides of interest comprising at least one D-base, said process comprising a stage of amplification, in the presence of cyanophage D polymerase and appropriate primers, of polynucleotides comprising at least one D-base.

[0243] Using this process, according to a technique of PCR or PCR-like type, from a polynucleotide of interest comprising at least one D-base with a known sequence, a large number of copies of this nucleotide are obtained.

[0244] According to one embodiment the gene involved in the synthesis of polynucleotides of interest comprising at least one D-base is the gene of succinyladenylate synthetase. In fact, succinyladenylate synthetase (ddba) catalyzes the reaction of dGMP to dSMP which is itself transformed into dDMP (FIG. 2).

[0245] According to one embodiment the polynucleotides of interest are nucleosides of therapeutic interest.

[0246] According to one embodiment, the polynucleotides of interest are produced by hemisynthesis or by fermentation.

[0247] The invention also relates to a process for the selection of compounds capable of stimulating or inhibiting the synthesis of D-bases and/or polynucleotides of interest incorporating at least one D-base, comprising the addition to the synthesis medium of the tested compound and comparison of the synthesis in the presence and in the absence of said compound.

[0248] According to another feature the invention relates to the use of the nucleotide sequences of cyanophage S-2L such as described previously in order to test their function in the metabolism of nucleotides, purines, pyrimidines or nucleosides, replication and transcription.

[0249] According to another feature the invention relates to the use of cyanophage S-2L for the determination of genes which allow the repair of the mismatches G:T or iG:T which occur by deamination.

[0250] The D-base itself is known to be a mutagen in E. coli. This could be explained by the fact that the deamination of D at position 2 leads to isoguanine (iG), for which it has recently been shown that the deoxynucleoside is mutagenic (M. Bouzon, P. Marliere, results not published). The deamination of D at position 6 leads to guanine. The fact that this last deamination reaction occurs after incorporation of D into the DNA, will result in a mutation in the following replication cycle. Thanks to the sequencing which has been carried out, the identification of genes which are able to repair the mismatches G:T or iG:T which occur by deamination is now possible.

[0251] According to another feature the invention relates to the use of cyanophage S-2L for the identification of genes and the production of proteins which are able to regenerate 5′-termini.

[0252] In fact the replication of the DNA of the cyanophage, the stability of which is high (7,8), could moreover require custom-made auxiliary proteins (helicase, SSB). The genome is constituted by a linear duplex, which supposes a regeneration machinery of the 5′-termini, such as the endonuclease used to resolve the concatemers in T7 (4), or the adduction protein in 5′ in phi29 (6), the activity of which could require the presence of D in their substrates.

[0253] According to another feature the invention relates to the use of cyanophage S-2L for the identification of genes capable of modulating the activity of the ribosomes.

[0254] In fact cyanophage S-2L is also able to form a ribonucleotide precursor which carries the D-base, in order to then reduce it to a corresponding deoxyribonucleotide, as occurs for the four bases of RNA (9). In this case, the transcription and translation of the phage genes could be carried out by using codons, or tRNAs as in T4 and T5, comprising this base. If such an option was taken by the phage, it is possible that certain of its genes modulate the activity of the ribosomes.

[0255] According to another aspect the invention relates to the use of cyanophage S-2L for the identification or the production of compounds inhibiting the biosynthesis of puric nucleotides.

[0256] In fact the phage genomes specify a whole range of inhibitors which have as target cellular enzymes such as thymidylate synthetase, dUTPase, etc. (11). In the case of S-2L, the inventors can now identify inhibitors capable of affecting the biosynthesis of puric nucleotides.

[0257] The invention thus also relates to a process using such inhibitors to control the metabolism or the gene expression of cells capable of being infected by an cyanophage S-2L, in particular cyanobacteria.

[0258] To the extent that the control of the metabolism of the nucleic acids or nucleosides, in particular of the DNA pyrimidines, is very useful in chemotherapy and gene therapy (2), the invention also relates to a process using such inhibitors in order to control this metabolism.

[0259] Other aspects and advantages of the invention will become apparent when reading the following description illustrated by the figures in which:

[0260] FIG. 1 represents a few examples of modified bases

[0261] FIGS. 2a and 2b represent two possible biosynthesis routes for the synthesis of D-bases by cyanophage S-2L, the route of FIG. 2b being the most likely

[0262] FIG. 3 schematically illustrates the genome of cyanophage S-2L

[0263] FIG. 4 schematically represents the potential difficulty of cloning genes incorporating D-bases in E. Coli.

[0264] Cyanophages S-2L are cultured in mass from the species Synechococcus elongatus (8). The DNA extracted is fragmented by sonication in order to constitute a shotgun bank cloned in a vector in E. coli. The clones are sequenced intensively on a sequencer until the genome is completely covered.

[0265] To the extent that ORFs are elucidated as homologous to known genes, they are expressed in E. coli or in Synechococcus, according to their supposed functions, in particular with the object of validating the functional hypotheses or exploring synthetic potentialities.

[0266] To this end, the supposed synthesis route intermediaries (FIG. 2) were synthesized according to the common methods of nucleoside and nucleotide chemistry. They are systematically subjected to extracts or mixtures of extracts of recombinant strains each expressing a gene of S-2L, in order to identify the enzymatic activities specified by the phage.

[0267] More precisely, the DNA of the S-2L phage was prepared from the Synechococcus elongatus culture lysate by adapting the techniques used in order to prepare the DNA of the λ-phage. This DNA was digested by different restriction enzymes, including SmaI, which made it possible to verify that the restriction profile obtained was identical to that described. Then, it was shown that the DNA of S-2L could be replicated in E. coli and sequenced according to the standard protocols, which led to the construction of a whole bank. This bank was constructed by insertion of DNA fragments digested by the enzyme CviJI (with a size comprised between 3 and 5 kb) in the plasmid pBAM digested by the enzyme SmaI and dephosphorylated. After electroporation of the E. coli DH10B strain, 400 clones were isolated and, of the latter, 330 were sequenced (290 in both orientations, 40 in the + or −0 orientation) at Genoscope France. The readings were collected in a single contig of 44.16 kb, the composition of which in bases is in conformity with that of the DNA of the phage, i.e. 69.3% G:C and 30.7% A:T (instead of D:T). All of the ORFs deduced from this contig were compared to different databases, which made it possible to annotate quite particularly 54 of them represented in Table 1 and quite particularly 14 of them (only taking account of statistically significant homologies with known bacterial or phage proteins) shown as “very significant” in Table 1.

| | | | | Very | SEQ ID No. and |
|---|---|---|---|---|---|
| PROTEIN | aa Number | Frame | Position | significant | ORF No. |
| DNA A chromosome replication | 134 | −2 | 661-1062 | | 14 |
| initiator protein | | | | | |
| DNA polymerase | 50 | 1 | 963-1112 | | 18 |
| Polyketide synthetase | 177 | −1 | 1308-1838 | | 26 |
| Betaglucosidase | 135 | −1 | 4698-5102 | | 68 |
| DNA helicase | 51 | 2 | 6280-6432 | X | 86 |
| Sigma factor | 203 | −3 | 6806-7414 | X | 92 |
| Ribonucleoprotein | 100 | 1 | 8064-8363 | | 105 |
| DNA-binding protein | 656 | −2 | 8320-10287 | | 109 |
| RNA-binding protein | 92 | 1 | 10299-10574 | | 134 |
| Replicase | 55 | −1 | 11052-11216 | | 142 |
| DNA-directed putative RNA Pol III | 72 | 3 | 11237-11452 | | 143 |
| broad sub-unit | | | | | |
| DNA topoisomerase I | 186 | −1 | 11613-12170 | | 148 |
| DNA packaging protein | 448 | −2 | 11956-13299 | X | 152 |
| Capsid protein | 109 | 1 | 13629-13955 | | 169 |
| Adenylosuccinate synthetase | 419 | −1 | 14235-15491 | X | 175 |
| Putative reverse transcriptase | 113 | 1 | 15132-15470 | | 187 |
| Transposase | 65 | 3 | 16799-16993 | | 208 |
| Exodeoxyribonuclease VIII | 347 | −2 | 17113-18153 | X | 211 |
| DNA helicase | 424 | 3 | 18962-20233 | X | 234 |
| DS RNA Adenosine deaminase | 172 | 3 | 20237-20752 | | 246 |
| rRNA Adenine N-6 | 63 | −2 | 20671-20859 | | 250 |
| methyltransferase | | | | | |
| Virulence protein E | 738 | 3 | 20921-23134 | X | 257 |
| RNA Polymerase II | 69 | −1 | 21444-21650 | | 264 |
| broad sub-unit | | | | | |
| Putative tRNA cleavage | 251 | −1 | 23316-24068 | | 286 |
| endonuclease | | | | | |
| Type 1 restriction enzyme (M | 60 | −1 | 24072-24251 | X | 298 |
| protein) | | | | | |
| Envelope protein | 385 | 3 | 25685-26839 | X | 316 |
| Guanylyl cyclase | 111 | −1 | 27183-27515 | | 332 |
| Uracyl-DNA glycosylase | 65 | −2 | 28063-28257 | | 342 |
| N-6 aminoadenine-N | 74 | 1 | 28239-28550 | | 347 |
| methyltransferase | | | | | |
| Inosine 5′monophosphate | 67 | −1 | 28401-28601 | | 348 |
| dehydrogenase | | | | | |
| Membrane protein | 377 | −1 | 28617-29747 | | 351 |
| Polymerase | 94 | −3 | 28871-29152 | | 355 |
| Transketolase | 82 | −1 | 29751-29996 | | 364 |
| Ribulose biphosphate carboxylase | 61 | 2 | 29893-30075 | | 365 |
| Tail absorption protein | 860 | 1 | 30105-32684 | | 369 |
| RNA-binding protein | 247 | 2 | 30118-30858 | | 370 |
| DNA Pol III gamma sub-unit | 103 | −2 | 31876-32184 | | 380 |
| M λ tail protein | 159 | 1 | 32889-33365 | | 392 |
| L λ tail protein | 509 | 3 | 33023-34549 | X | 395 |
| K λ tail protein | 271 | 2 | 30118-30858 | X | 406 |
| RNA Pol beta (fragment) | 84 | 3 | 35267-35518 | | 418 |
| I λ tail protein | 236 | 2 | 35458-36165 | | 422 |
| J λ tail protein | 1456 | 1 | 35598-39965 | X | 425 |
| DNA topoisomerase I | 79 | 2 | 36169-36405 | | 429 |
| Dedoxyadenine methylase | 74 | −3 | 36428-36649 | | 432 |
| RNA Polymerase II | 146 | 2 | 36646-37083 | | 433 |
| broad sub-unit | | | | | |
| DNA Polymerase I | 63 | −3 | 39089-39277 | | 454 |
| DNA gyrase | 101 | 3 | 39989-40291 | | 464 |
| sub-unit B | | | | | |
| Dioxygenase | 301 | −2 | 40156-41058 | | 466 |
| RNA guanylyltransferase | 190 | 1 | 41097-41666 | | 472 |
| Lysozyme | 381 | 3 | 41951-43093 | X | 484 |
| RNA binding protein | 129 | −2 | 42457-42843 | | 489 |
| Tranposase/exonuclease | 110 | 3 | 43097-43426 | | 494 |
| Phosphodiesterase | 58 | −2 | 43417-43590 | | 500 |

[0268] These are in particular proteins involved in the formation and assembly of the tail of bacteriophage λ·M, L, K, I and J tail protein, GP17 protein which plays a role in the DNA packaging in bacteriophage T4, an exonuclease which could be involved in the exclusion of the A-base, an RNA helicase, a sigma factor and a succinyladenylate synthetase.

[0269] The identification of genes coding for a sigma factor and a helicase leads to the conclusion that the transcription of the genome of S-2L and the replication of the cyanophage DNA probably required specific proteins encoded by the phage, the activity of which could depend on the D-base.

[0270] On the other hand, it seems very likely that the D-base is formed by semi-replicative modification. Between the two biosynthesis routes of dDTP formation described above, the identification of a succinyladenylate synthetase gene homologue called ddbA (deoxyribodiaminopurine biosynthetic gene A) leads to the conclusion that it is the second route which is probably taken during phage infection (FIG. 2).

[0271] Several tests have been carried out in order to determine the activity of the corresponding protein. The results suggest that the expression of ddbA allows restoration of the growth of a strain of E. coli expressing the yaaG gene of Bacillus subtilis in the presence of a high concentration of dG (10 mM). On the other hand, 2,6-diaminopurine becomes toxic (10 mM) to E. coli when it is in phosphorylated form (which has been tested in the same strain of E. coli expressing the yaaG gene of Bacillus subtilis i.e. MG1655 pSU yaaG) which makes it possible to have a screen in order to identify in vivo the complete biosynthesis route of the D-base.

[0272] However from now on complete identification is not necessary in order to obtain D-bases by the processes described above.

[0273] Another approach consists of systematically expressing the ORFs specifying all the possible genes of S-2L and combining the raw activities resulting from this expression in order to cause the route metabolites to appear in vitro. An inducible metabolic route producing dDTP will then be created in E. coli by assembly of the appropriate genes. The route thus created will be applied to synthetic precursors in order to generate deviant nucleotides by the base and the sugar.

[0274] The use of the D-base in the replication and transcription processes is systematically researched in the extracts of the bacteria expressing the phage ORFs.

[0275] The above results were obtained by means of the following operations. The ddbA gene was expressed in E. coli under the control of an inducible promoter and several tests were carried out in order to determine the activity of the corresponding protein. The results obtained show that the expression of ddbA allows restoration of the growth of E. coli in the presence of a high concentration of dGMP. On the other hand, 2,6-diaminopurine becomes toxic to E. coli when it is in phosphorylated form which makes it possible to have a screen in order to identify in vivo the complete biosynthesis route of the D-base. The ddbA gene was amplified using 100 pmol of each ngaattcaagctttcagcgacggtagcgggcatac and nnnnccatggtgaagaactgcaacctgatc oligonucleotide,100 ng of DNA of S-2L as matrix DNA, 200 mM of each of the dNTPs, 10 ml of Pfu polymerase buffer concentrated 10 times, 10% DMSO and 5U Pfu polymerase. The amplification cycles were: a 10-minute stage at 95° C., then 25 cycles of 30 seconds at 95° C., 30 seconds at 56° C.,2 minutes 20 seconds at 72° C. then a 10-minute stage at 72° C. The amplification product was then purified using the Jetsorb Kit (Genomed GmbH) then digested by the restriction enzymes NcoI and HindIII. After purification, the amplification product was inserted into plasmid pBAD24 (Guzman et al., 1995 J Bacteriol 177: 4121-4130) digested by the same restriction enzymes. The ddbA gene in this construction is expressed starting with the araBAD operon promoter which is inducible by arabinose.

[0276] The cyanophage S-2L bank is maintained in the E. Coli strain β2033 deposited on 24th Jan. 2001 at the Collection Nationale de Cultures de Microorganismes, Institut Pasteur, 25 rue du Dr Roux, 75724 PARIS Cedex 15, France, according to the provisions of the Budapest Treaty, and registered under serial number 1-2619.

[0277] Thanks to the work carried out by the inventors, the sequencing of the genome of S-2L makes it possible to alter, inhibit or diversify the synthesis of nucleic acids in vitro and in vivo.

1. Nucleotide sequence of cyanophage S-2L, characterized in that it corresponds to SEQ ID No. 1.

2. Nucleotide sequence of cyanophage S-2L, characterized in that it is chosen from:
a) a nucleotide sequence comprising at least 80% identity with SEQ ID No. 1;
b) a nucleotide sequence hybridizing under high stringency conditions with SEQ ID No. 1;
c) a nucleotide sequence which complements SEQ ID No. 1 or which complements a nucleotide sequence as defined in a), or b), or a nucleotide sequence of the corresponding RNA;
d) a nucleotide sequence of a representative fragment of SEQ ID No. 1, or of a representative fragment of a nucleotide sequence as defined in a), b) or c);
e) a nucleotide sequence comprising a sequence as defined in a), b), c) or d); and
f) a nucleotide sequence modified from a nucleotide sequence as defined in a), b), c), d) or e).

3. Nucleotide sequence according to claim 2, characterized in that it codes for a polypeptide chosen from:
a) the polypeptides of cyanophage S-2L of sequences SEQ ID No. 2 to SEQ ID No. 527;
b) preferably the polypeptides of sequence SEQ ID No. 14, 18, 26, 68, 86, 92, 105, 109, 134, 142, 143, 148, 152, 169, 175, 187, 208, 211, 234, 246, 250,257, 264, 286, 298, 316, 332, 342, 347, 348, 351, 355, 364, 365, 369, 370, 392, 395, 406, 418, 422, 425, 429, 432, 433, 454, 464, 466, 472, 484, 489, 494, 500;
c) preferably also the polypeptides of sequence SEQ ID No. 86, 92, 152, 175, 234, 257, 298, 316, 395, 406, 425, 484;
d) the polypeptides having at least 80% preferably 85%, 90%, 95% and 98% identity with a polypeptide from a), b), c);
e) the biologically active fragments of the polypeptides from a), b), c), d)
f) the polypeptides modified from a), b), c), d), e).

4. Nucleotide sequence characterized in that it comprises a nucleotide sequence chosen from:
a) a nucleotide sequence according to claim 3;
b) a nucleotide sequence comprising at least 80% identity with a nucleotide sequence according to claim 3;
c) a nucleotide sequence hybridizing under high stringency conditions with a nucleotide sequence according to claim 3;
d) a complementary or RNA nucleotide sequence corresponding to a sequence as defined in a), b) or c);
e) a nucleotide sequence fragment representative of a sequence as defined in a), b), c) or d); and
f) a nucleotide sequence modified from a sequence as defined in a), b), c), d) or e).

5. Polypeptide encoded by a nucleotide sequence according to one of claims 2 to 4.

6. Polypeptide according to claim 5, characterized in that it is chosen from the peptides of sequence SEQ ID No. 2 to 527, preferably from the sequences SEQ ID No. 14, 18, 26, 68, 86, 92, 105, 109, 134, 142, 143, 148, 152, 169, 175, 187, 208, 211, 234, 246, 250, 257, 264, 286, 298, 316, 332, 342, 347, 348, 351, 355, 364, 365, 369, 370, 392, 395, 406, 418, 422, 425, 429, 432, 433, 454, 464, 466, 472, 484, 489, 494, 500;

7. Polypeptide according to claim 5 or 6, characterized in that it is chosen from the sequences SEQ ID No. 86, 92, 152, 175, 234, 257, 298, 316, 395, 406, 425, 484;

8. Polypeptide characterized in that it comprises a polypeptide chosen from:
a) a polypeptide according to one of claims 5 to 7;
b) a polypeptide having at least 80% identity with a polypeptide according to one of claims 5 to 7;
c) a fragment of at least 5 amino acids of a polypeptide according to one of claims 5 to 7, or as defined in b);
d) a biologically active fragment of a polypeptide according to one of claims 5 to 7, or as defined in b) or c); and
e) a polypeptide modified from a polypeptide according to one of claims 5 to 7, or as defined in b), c) or d).

9. Nucleotide sequence according to one of claims 2 to 4, characterized in that it codes for a polypeptide of cyanophage S-2L, involved in the biosynthesis of nucleotides, purines, pyrimidines or nucleosides or for one of its representative fragments.

10. Nucleotide sequence according to one of claims 2 to 4, characterized in that it codes for a polypeptide of cyanophage S-2L, involved in the biosynthesis of D-bases or for one of its representative fragments.

11. Nucleotide sequence according to claim 10, characterized in that it codes for a peptide of sequence SEQ ID No. 175.

12. Nucleotide sequence according to one of claims 2 to 4, characterized in that it codes for a polypeptide of cyanophage S-2L, involved in the replication process, or for one of its representative fragments, preferably a peptide of sequence SEQ ID No. 14, 18, 142, 355, 429, 454 (DNA polymerase, topoisomerase activity).

13. Nucleotide sequence according to one of claims 2 to 4, characterized in that it codes for a polypeptide of cyanophage S-2L, involved in the transcription process, or for one of its representative fragments, preferably a peptide of sequence SEQ ID No. 92, 143, 187, 234, also preferably SEQ ID No. 92.

14. Nucleotide sequence according to one of claims 2 to 4, characterized in that it codes for an envelope polypeptide of cyanophage S-2L, or one of its representative fragments, preferably a peptide of sequence SEQ ID No. 169, 316, 351, 392, 395, 406, 422, 425, in particular a peptide of sequence SEQ ID No. 395, 406, 425.

15. Nucleotide sequence according to one of claims 2 to 4, characterized in that it codes for a polypeptide of cyanophage S-2L involved in the rerouting of the cell machinery or one of its representative fragments.

16. Nucleotide sequence according to one of claims 2 to 4, characterized in that it codes for a polypeptide of cyanophage S-2L involved in virulence or one of its representative fragments, preferably a peptide of sequence SEQ ID No. 257.

17. Polypeptide according to one of claims 5 to 8, characterized in that it is a polypeptide of cyanophage S-2L involved in the biosynthesis of nucleotides, purines, pyrimidines or nucleosides.

18. Polypeptide according to one of claims 5 to 8, characterized in that it is a polypeptide of cyanophage S-2L involved in the biosynthesis of D-bases, preferably a peptide of sequence SEQ ID No. 175 or a representative fragment.

19. Polypeptide according to one of claims 5 to 8, characterized in that it is a polypeptide of cyanophage S-2L involved in the replication process, preferably a peptide of sequence SEQ ID No. 14, 18, 142, 355, 429, 454 or a representative fragment.

20. Polypeptide according to one of claims 5 to 8, characterized in that it is a polypeptide of cyanophage S-2L, involved in the transcription process, preferably a peptide of sequence SEQ ID No. 92, 143, 187 or a representative fragment.

21. Polypeptide according to one of claims 5 to 8, characterized in that it is an envelope polypeptide of cyanophage S-2L, preferably a peptide of sequence SEQ ID No. 169, 316, 351, 392, 395, 406, 422, 425 or a representative fragment.

22. Polypeptide according to one of claims 5 to 8, characterized in that it is a polypeptide of cyanophage S-2L involved in intermediate metabolism, or a representative fragment.

23. Polypeptide according to one of claims 5 to 8, characterized in that it is a polypeptide of cyanophage S-2L involved in the process of rerouting the cell machinery or one of its fragments.

24. DNA chip or filter, characterized in that it contains at least one nucleotide sequence according to any one of claims 2 to 4.

25. Cloning and/or expression vector, characterized in that it contains a nucleotide sequence according to one of claims 3 or 4 or 9 to 16.

26. Cloning and/or expression vector according to claim 25, characterized in that it contains a nucleotide sequence according to claim 10 or 11, in particular coding for a protein involved in the sythesis of D-bases.

27. Cloning and/or expression vector according to claim 25, characterized in that it contains a nucleotide sequence according to claim 11 or 12, in particular coding for a polymerase capable of polymerizing D-bases.

28. Host cell, characterized in that it is transformed by a vector according to one of claims 25 to 27.

29. Host cell according to claim 28, characterized in that it is a bacterium.

30. Process for preparing a polypeptide of interest, characterized in that a cell transformed by a vector according to one of claims 25 to 27 is cultured under conditions allowing the expression of said polypeptide, and in that said recombinant polypeptide is recovered.

31. Process according to claim 30, characterized in that the polypeptide of interest is a protein involved in the metabolism of D-bases, in particular succinyladenylate synthetase.

32. Process according to claim, characterized in that the polypeptide of interest is a polymerase of cyanophages S-2L, capable of polymerizing D-bases.

33. Recombinant polypeptide capable of being obtained by a process according to claim 30.

34. Monoclonal or polyclonal antibody, its fragments, or chimeric antibody, characterized in that it is capable of specifically recognizing a polypeptide according to one of claims 5 to 8 or 17 to 23.

35. Antibody according to claim 34, characterized in that it is a marked antibody.

36. Protein chip characterized in that it contains at least one polypeptide according to one of claims 5 to 8 or 17 to 23, or at least one antibody according to one of claims 34 or 35, immobilized on the support of said chip.

37. Process for detection and/or identification of cyanophage S-2L or of a related phage in a biological sample, characterized in that it uses a nucleotide sequence according to one of claims 3 to 4 or 9 to 16.

38. Process for obtaining D-bases and/or polynucleotides of interest comprising at least one D-base, comprising the culture of a microorganism containing at least one nucleotide sequence of cyanophage S-2L coding for at least one polypeptide involved in the synthesis of D-bases, under appropriate conditions for the development of the vector and the synthesis of D-bases and/or said polynucleotides of interest.

39. Process according to claim 38 comprising:
the addition to a medium comprising the substrates required for obtaining D-bases, of an extract or mixture of extracts of recombinant bacteria expressing at least one gene of cyanophage S-2L involved in the synthesis of D-bases
if appropriate the extraction of the polynucleotides of interest.

40. Process according to claim 38 comprising:
the preparation of at least one DNA sequence coding for a polypeptide capable of provoking the synthesis of at least one D-base in a host microorganism
the cloning of said coding sequence in a vector capable of being transferred into and replicating in said host microorganism, this vector comprising the elements necessary for the expression of said coding sequence
the transfer of the vector comprising said coding sequence into a microorganism capable of producing the enzymes of the D-base synthesis directed by said coding sequence
the culture of the microorganism under appropriate conditions for the development of the vector and the synthesis of the D-bases
if appropriate the extraction of D-bases and/or of said polynucleotides of interest.

41. Process for obtaining D-bases and/or polynucleotides of interest comprising at least one D-base, said process comprising:
the addition, to a medium comprising the substrates required for obtaining D-bases, of the expression product of at least one gene of cyanophage S-2L involved in the synthesis of D-bases, in order to produce D-bases and/or polynucleotides of interest comprising at least one D-base
the extraction of the D-bases and/or said polynucleotides of interest.

42. Process for obtaining polynucleotides of interest comprising at least one D-base, said process comprising the culture of a microorganism containing at least one nucleotide sequence of cyanophage S-2L coding for at least one polypeptide involved in the extension of said polynucleotides with incorporation of D-bases, DNA polymerase in particular, in appropriate conditions for the development of the vector and the extension of said polynucleotides.

43. Process according to any one of claims 38 to 42 characterized in that the gene involved in the synthesis of the D-bases is the gene of succinyladenylate synthetase.

44. Process according to any one of claims 38 to 42 characterized in that it comprises a stage of amplification, in the presence of cyanophage D polymerase and appropriate primers, of polynucleotides comprising at least one D-base.

45. Process for selection of compounds capable of stimulating or inhibiting the synthesis of D-bases and/or polynucleotides of interest incorporating at least one D-base, comprising the addition to the synthesis medium of the tested compound and comparison of the synthesis in the presence and in the absence of said compound.

46. Use of cyanophage S-2L for obtaining DNA polymerase or RNA polymerase involved in the metabolism of the D-bases.

47. Use of cyanophage S-2L for the production of nucleotides of interest not obtained naturally comprising at least one D-base, dDMP and dDTP.

48. Strain of cyanophage S-2L deposited at the CNCM No. 1-2619 characterized in that it contains at least one nucleotide sequence according to claims 1 to 4.

49. Process for producing a gene bank of cyanophage S-2L characterized in that the process comprises the following stages:
a) Culture of purified cyanophages S-2L from the species Synechococcus,
b) Fragmentation of the DNA extracted by the sonication technique,
c) Cloning of the Shotgun bank obtained in an E. coli vector, and
d) Sequencing of the clones until the genome is completely covered.

50. Gene bank of cyanophage S-2L deposited on 24th Jan. 2001 at the C.N.C.M. according to the provisions of the Budapest Treaty, and registered under accession number 1-2619 obtained by a process according to claim 49.

51. Plasmids contained in recombinant bacteria deposited at the C.N.C.M. under reference number 1-2619.

52. Recombinant bacteria such as deposited at the C.N.C.M. under reference number 1-2619.

The application's sequence listing, which the Patent Office published only in electronic form, follows.

SEQUENCE LISTING (527 sequences)

SEQ ID NO: 1 - DNA, 45570 bp, Cyanophage S-2L
gcgccctgtcggagggtcctggacgacacggtgacgttcaaggtgggcgccatcggatggccctgcgccctggggatcttgtcaaggtcatggacccggacaagggcggggtccgcttcggcggtcgggtggttgcccaggacggcgacacgatcacgctcgacgcggcacccccgacacccctcgccggccgggggcagccagccccggggggcaccgcccacggacgggccggtcatccggaagccgaccggggccccgcgccacgacggcaccgggatgaagccgaccggggccccgcgccaggggcccccggagggggtgccgccgaggggcgggtcgtaggccctgggcggggtctgccagaccgccgggctgtcgggccgctgcccacgccagccggggcgccccgggtcggggatgaagccgtcaggtggggcgtcggcccaggccgcagccggcaccagggccagcaggagcagcaggagcctcatgcggcctcctgtatggcggcgtagatctcccggaggcggtcgccggtctggcggatctgctccggggtgcaggggacgacgtcgaggcggacggccccggtctccgagcagacgtagggcatgtgcggctcgaggccttcgggccgggtcgagggggcgtcgttcactggggcaccccctgggtcgaggtgggctcccagccgccgtgccccagcaccagatccaccccggcgatgcccagatcgagcttgcggctggcgaggatctccttcctcttgtgctgggccacctcgatagtcagccaggccatgccatgttggaggaccgagtcgatgtgcggggtgtactcgttgaaatcccggttgagctccaggaggtaccagccccgtttgtcagtgagggcgtagacggtcctccgaggacgggagtcggtagcagcgttcgaagtgggcgaggacatggggataggacgagtggacgaactgggcctcggcgtcaggggccggtgccgaggccggaggggtaggcggctgtgggcggcggggtgggacccccagcaccaagcggatcaggcgaaggagcagcaacatagacggctgtaaggacggcgaggactgctgagagaataggggagctcatgaggcggctctgcgcatgcgggattcggcgttggggaccacgtgccagttggcagacgaggccggggtgacgacggtggcgccgttggggtgcttccagatcaggtgcttgccctggcggtggaggtagaagccccatcgcttggccgcagcctcgatctggcgcctgtagctaccggacacgggacaggtcctcccgggcttcggctgggggctcctccagccagacgcgcatgccgccgacgagggcgcagaggcgtccctcgcagctgaccacgcggccggccggatagttgaggacctgggggctgagaggcatcccggggagcgggtgctggatgcggagtctgggcatggtgtcagaggggggagggggtgggctccaccaggtcgagccgggtggcctcttgaagctgtcgctccacctgggcgtggtcgtcgaggaaccgctggaggttcgcgacgacgcccggctccaggtaggcgaccatgggcgagcggtggtcgttgacgcggatctccaggccgtagccatcgaaggtcgcgtagacgccgtcgccgacgtggcgggtctgttcggacatgggatcaacggcaagcgagagagatcaggcgctgggtgtcggagatgtccttgggggtggagtcggggttgaccatctccaggaacagcaggtgccggtaggcggtgcaggcgccctgcccgtcaccacgggcacggctgcggacgccatactcgagtgcgcccagctgggcgtagaggcgaaacacgcccgtgctgggctcgagcggggacgcctgcgctgtggtggcggcgaagacgacgaggccaccgcagaaggtggaaaggaaggcgtagaggggtctcatgggagggggtggaggtggacacctggaaaggggcccctgggggccccggaggggttcggccgtggccggggggggtcagcccaggctgagggccagcttgcgggcctcggccagggttagagactggcagtcggcatcgttggcgatgtcgccgccggggcggacgatggtgtagcggcccatgcggacccaaccggacatgtagtagccggcggcccggagggcatcctggatctgggccttggtcagggccttgggggccgctgtcgtgtgggcgacggtcgcctcgatcgcccggcccccgatcttcgcagcggctgcgatggccaggccggggcggccggcccagctgtgggcgaaccaggtgccgtcgctggactggcgggcgacgcagtgggtgtaggtgcgctcggccgacttgcgggtggcggtggtgccgtcggggagggtggcggtaaaggtggtggccattggggggaggagcggtggaggggcagttccccctccgttccactattaaagcacgggagcaatccccgcgcaatatgtcacagacggatcgagtcagccaggatctcaagccggcgcaccagttcccgggcctgctcgatctggtggtccagccgggcggacatcgggcaaacgggggccgccgacatcttctcgagcaccggggccgccatggggggctccatcgacagcaccggctcgagccgttcccagaggcgggaggtggagttgtgcgtctgctgcagcaggtcctcgagggcggacatctgctccaggacgccgggggtgggggcggacctgggggcgctctctcggatggcgtcgtacggatcgcggggcatgagggccatgggcggttggaatagggtgggggccggcctgagccggtatccccactatagcacggggcaatcagccctcgtcgtcgtcgccctcgtcggggtcggggcagccgagcttggtggcgagctcctccaccagctggttaaaggcgcagtactcgatgtcgttgatctcggcgtggatcagcggcgccagggtgccccagacgttggcgtgggcctggccgggctcgcagtggtcgtacagatcggcggggagctcgtcggccctgtaggcggcggtcagctggtttatggagtcccaagcctgggagatcagctggagggcggtggctttgtccatggtgggggagcggtgggggcgcttcggcccccgtatacctattaaagcacggcggattcagccgcgcaatacctcagcggagatcggggttcgtagtggtccacccctgggcgcggtatcggcgccagtcggctcgggcctccgccaccccgacggtgtgggtgtcgtgggcatagccggaccaggtgcttatccggacggcctggccgtcacccaggggcatgtagctccgggagacacggtgcagaccagagagcaggggtcctggcaggtagagcttgtgaatcggctgggatctcgacatcgtggggggagcagtggggtgggacggggtgggggccgtggggcccccgggtggctcaggccaggttgaccttgacgtgctcgatcagctgcgccacctggctgtgcttgtagagggtgccccagtaggcgatccgcttgtactggtcctacaccaagtagctgagcccctcctggccggcgtcttggatgacgacggtgttgccctcgatggtgcgctgctcgaggtcggcctcgaggatgcgcaggtcgtcgattacctcagcccgccaggggccaagggttaggccggcttcggcgaactgggtgtggatggtgtccatggtttggaagcggtgggggcgcctcggcccccgtacaactattaaaacacgggggattcagctgcgcaataccccggggctggtcagcccgccaggtaggcgaaggcctcccggatctcggcgtcgtagacgatcttctcggtgagggtgcccaggttgtgctcctggcagaaggccacggcctcctggacctggtatatggggccagagatcgtgtagtggcaggtcgagcggaaggtccactcgatctgggcgccacagccggcgaggatctgggcctcgatctggcgggcgatggcggggagggtggcgcggtccatggggtcctgtgcggtgtatacctattaaagcacggcggattacgaggcgcaatacgcctcggcccaggccaggatctcggcccggttgcccacgaacaccacccgctcctcgccccactggggctggtcgaggggggtgccgtagggcataccgtcggcgacccggacgtggtagatcggggcccggctgctgccctggcgccggccatgctgacgatcgaagtgcacctgagcggggccgttggcgccccggtgcttgcggcactgggagatggccatccgggcggcctggagggtgcgtaacttggccatggggtgtcggggtggggtgggacgagtgaggggcccctcccggggcccggaggggctcagcggccggccgccatctgggccttgccggcgtcggtcagcaccagcacccggtgcgacttgcgggtgccctcgatggtggccaggaggccggccttcttgaggttggtcaggcggggcgcctcggtgagggggatgtgcaggacggtgccgagcatggcaccacggccctcgccctgctgctcaatcaccaggccgaccctgtagaacagcgccttggtggcgtcgttgagggcgtcccaggtgaagccggtccgcttgggctggcggggctccggggtgtcgaggccggtctggggggcagcggtgcggcagccggcggcggggtccacccggtggtcggcggcggcctcggagatggtctgggtggcccgctgctcggcggtggcggcggtcatgccctcggcgacggcggcctcctcggcgacggcctgggcgacgatggcctcggccttggccaggccgatccgcttgccgtggcagtagaagtagccgctgggggtgcaggttatgccgcagtactcgacgttctgctggctgtattcggcggccagaacggcttcgtcgagggtggtgggggtggggaagaagtcagacatcggaggggtggcggtggggtggggttggtgcccccggactgctgggggctggtcggcgcgtgggtggcgcctggtgcccccggactgctgggggcgggtcggggctggactgctgcccctggtcggcgcgtgggtggcgccatcggggggttgtctctccccccttgtataactattaaagcacggcggctgtgcctgcgcaatcccctgcatagccacttcacagactgtcacacttcgggcctggcgacggcggcggagctcgtccccgtaggtgtgggcctcgtcctcgtaccgcccctcggcgacggggttccacccgcgcatgcgctcggcggcctggcgggcatcccgagccgaccaccagagctcgtagtcggtcatcgaccgggccttggcctcccagcgggcgaagtcggcagcggtggcatggtgggcgcaggacatggtcggggtggcggtgggggggaggggggatgggcccggggggcgccggggggcggctcaggccggcagcaggtcgtcccggcagatcggggtcaggacgtcccgcttggcaacctcgacgagggtctcgtggccgagcttggcattccagacccggaacttggccgaggtggtgtgggcgccccagtagccgggggtgcgggacagccacaccaggagctcgaccgagctcgaccaggtcaggtcccggtttagagcccgcacctcgtgggtggccatgggctggccgttgacggtaaagcccgccacccggttgccgacttcgtccagctgatcagattcacgagaggagcggcccctgggccgtcgagtggggcattccgcccctgttccactattaaagcacggaaaaaccccggacgcaatacgcccggggtcgggatgggggccgaagcccccgggtgaatcagcccaggtcggccccggtgtgggcggcccagatggcccggccctcgtcggtcaggcggagcatcttgtgggacttcttctcgccctcgacggtctccaggaggcccgccttcttgaggttggtcaggcggggggcgtcggtcaggggcaccttgacgtcggtgcccaggcgggcggcggcagtcatgccgtggtcccgggtggcggtctggatctcctcgcagaggcggaagaacaggtccttggtcgcctgattcagggcatcgaaggagaacccggtgcgcttgggctctttggtctgcttggcggtggcttcggtcatgggggcttcgagtttggactggatgtgggcgagggcggcctcctcggtgcaacgggtgccgtcgatgctgaatcggccgcttgggtgaaccttcacaccgtaaccaccagcgggggtgttatcgcgctgggcgacggtggtccaacgcttgatgagatcggcgggctgaacggtcatgggtggcgaggcggtggagatcgtgtctgtctccgttccactagtaaagcacgggggctatgccctcgcaattccccgaatagacggttcacaggctgtaacaaacgccctgctcccggaggcgggcccgcagccgctgcaggtcggcggcggcgaccttctcgccgtcctccagccgctgcagcaccggctcgagctccgggcccgccgcctcacaaagccggcggtacaggtcggggtcggtctcaggcgggggcggggcggcggcctcaaactcgctaccatcctccagcttgttccgcatggcgccggtcgacaacaccaccgagcagagcctggcccccacgacgagctcgtggtcccggcgcccaggccggcgcgctccaggatctgctccgggtgccgccctcgccatcggcctctgtgtagtcggtaagattattttgggccgtaagtgtcataccgatgctgccgtggataaggtaaatcacacgggtgatcgattcaaggataaaacacatccggtgcgtgcatttattgttacagaagctgcggatgtagagctcggcggaacgctgcaggccgatgaccccctcctggagcaggtcggcgtacgtcagggaggtgccgtcgagtcgccgggtgtagtaccgggcgatcgatgcgaccaggcgcaggttgcagaggacgaaccggtcccgagcccgtctgccggaccggacgatggccgggggcaccggctccgggtgagtcagccaggcttggatccggcgccccaggaggatttcctcccggcgagtgaggagggggtacttcccagcgatgtcgaggaagggcaggtcgtctgacaccagggtggggcgtggaggctgtgctaccatagcacagcgctatgccacccacaatgccgaatgccctcgaacggaccctcaaccagaggggcacccagtacggcccagcccgggagcagtgggccctcgcccagcggatcaagggtgccatgcgcagcaccgagcgattccacgtgctgagcccggttgaggccgaggccctggaccagatcgccaccaagattagccgcctgatctctggcctgcccgagcagcacgacacctggcacgacatcgccgggtatgccaccgtggccgagcaggcgctgcgcgaggaggccgatgcaggactggactgagatcctggccagggcggggctcccggagccccccgggtaccgggagacgctcgccgagatgcgccggcccggatacgaatccgaggcggccaagtggcgccgtctccaggccgaggccgcagcggcccgggcagaggcggccaaggcggccaagcggagggcgcgatgaaggtggtcgtagacgcgctcatgggcgccgtcgcccagtcgatgtcggcgttcttctcgcgccccgtcacggtccaagacttggaggcctggggcaaccacctgtacctggagcatgcgggccccctgggcgacgccccaccgggtgcggcctggtcccaggagtggcggatcctgcttgacgggcagctggtcggcgtcgtccagcaggtcgctttccgccagggcgaccggctccaggtccgctcccggggtggggtgcgtccgatgtatctgtgtgctatgctgggagtagaggaccggaagacatgaaacgagacgacatcaagggcgcaccgctgatcctggccacaggacgcggtctaccccccgacccgaacgagccgcccaagggcgacctggccgcctgggccgcctaccacggcatcgagtacgtcaaccgggcggaggagccaccggcacctggcgaagaaccacgcgggtgaacgcgccctcagccttgggctgatacccacctgcgctcttggccggggtggccccttcctcgatgcggaccacctcgtagcggaccccctccggcatgagcacctcgagctcgtcgtcgaactttgacatgctggagatggggacgccgtggaggttgtcctcgactacgtatgtcaccgagtaccggtccttgcggtacagggcgttgaaccggtaggacaccgactcgtcggtggtccagctttccagcgtgatcgacggctccccggctcggatgcggcggatgtcctcctcgatggccgctttgctgtggtagcgcatgccccggtaggtcgggccgcctttgtagacgggcgccgtcgtgatgaagtcctcgagccggtcggccttgtcgagtaggtctgccagccggtcgtcggacatctgcttcctggccatctgcttaccaaaatcggtcagatccatgccccgggcctgggcggccttcacctgggcggtgcggatctcggtgtaaccagagccggtccagtcgcgcacgacggcccggtgcttggtgcggtacttgtgcttgatgtcggttgtggtgtcgctattacgacgggcacgcacctcagaatacagcctgggcggtgccggcggtgcgggggccggggctggggccgggcgggcacgacgtggcgcccgggtgaccacgggaggggccggagccggcggcggggccactggtgcgggctggaccaatggaggggccacgacgggcttcggagccttgggcttcggcttgggcttcggaggcggggcgggcttcttgacactgccgggccgcaggagctcgaccacggccccctggggatccttgacgtacttgcccttggggccggtcagcttccggaaccgggccaggcgggccttggtgccgagcaccgcctgggcggtttcgtcgttggaccgctgcagcatcgccccgacggtgcccccggggttgtcccggcgccggacccaatactgctggccgttgatcttacggggcgtcttgtaggcggcctccccggtccagccggccggcgggggcagtcgtttgcccttggcgtcgtactgcaccggcacctgttcgaggtaggtctccggcagggcgcccagggtgtcgctcagcggggtgagcggcaggatccggcaccgctcgttccagtgggccggccagggggccttcttgcgctccttgtacctggtgccgtcgagcggggcgcacaccgggcagagccggccgtcgttgctggcgtcccagatgtagcggttgccgtccttgtctcccaggacgtcctcgttggcctcgttgaatgcgtcatgcgccgtctggctggcctgggccatcgacgtacggaccagggcttccacctgccggcggttggccgtggccatcgccgtccggacgtcggcgacgatctcggagttggatttggacaggaggaagccctcccggagccgggcctcgatcagcttcgtctgcccctgctggaatgcagcggtcgccgtgccgatggtgtagggctggcccgacgccttccggaggagcccagggaatgtccggaagcccgtatcccgggcgacggccaccagctgctgcggggtgaccgtgacgcccccgacgcccaccgagaggccgtcgacgccgcaacggccaccggggtcgccccgacggcccgcaggtaggtgtcggcctgcaccagcccctcggagaacgcctgggcctgggccgggggcagcacggcgtcgatccggtcgccgacggcggccacctgggcctggatgacggcgagcgtctggttcaggcgcactgccgctcgagccggccggcgggcagcgtctggagctcctcgaggatgcggcgggtggcctgctcgtaggtcgggaggatccggctcagcgcctgattcgagaggctgcggagggcgaactggtcccggacgaccagggcctggggattcactcgtcagtctccggggggtcggcctccgggtcggcttccgggtcggcctccggatccggggtgtcggcctccgggtcgagctcctcctcggtctcctcggcctcctcgccctcgatggtgtcccggagctcctcgacgtccacgctgtcgggcagccattcgccggtctgccagaccgtcaggaaggtctccaggtcgatgccgccatcgatgtacgccttgaggtagagctccgcctcctccttagtcagcttggcgtggtcgaagtcgctgtcgatgacgaccgtggacgcctcccggccggtgtactccccacaccagttcatgacgatctggagcgtcgaggccaggtctcgggcgatgaccgagagcatgctgttggattcggcccggtcaagtgtcttggccccctcggtctcttggaaggtctgctgctgggtgaggaccgagatgcccagctgggtgatctgctccttgagcacctccagttctttctggtgcgcctcgcagctggccccggtgatctcgcaatacttggagcccccaccgatggggtactgcaaggcgctgttgaccgagagcccgatctcgccatcggtgttggtcgggtccaggtcgtcggcctcctcgtcgtcgtcgccctcccagccgaccatgtcaaggatgggctggccggcaatcgtcagcacctgggtcaggtcgctgcgccgttggaaatgggccaggttgagatgggcgcagtcctcgagcgggggccggctgagcagcaccccctccttttggctgtaggtcgtggccagggggatctctttgagtgtggtgtcgccgctctcgtcctcgaccttctcccaggcggtgccggtcaggcgcagcacctcgtaggcgcccggggtcagcacccggatctgctcctcgacgttgaccccgtacttgccggcgggcacctcgacgtactcccggatccgcacctgctggaggccggagccctcccgggggttgtgccggcggccgatggtggcccagcagggcacctgcaccagaaatggcttgtccccggccagccgctggtcgagcaggctctggcgttcctcgctggtgtagtcggccaggaccgagctatgcccgtaagagatggccagcccgagcgttacccgggcgaagtcgtccagggaggagccctgacggtccacgtctttgcgccactcctcccagtaggcctcgtcgcccccctgcagctggatcggcttccggaggatcaggccggcgccccccggatcaggcgggccaggtagggggtgtacaccgcccgggagacccgcccgatgtactgccgtttacgctcccgggggaaccggggcaggtagtaatcgcagaacgcccggaggtaccggacgccctccaggttggcccggatcacctcccagcggcgcagcatcacccggtaggtcaggtccggttcgttcgggtcgtccggcgccagggagtctcctcccagctttgcctcggccagggcctcgggattcaggaccgtgtgatcccgccagccgagggcgggatccatcggggcggaggagggcgtctcagtcataccccggagcttagaccagcgagaagttggaagagccggaacgccagcccttgacgcggttgcaggccgacagggccaggtaccccaggccgtccgtccagtgctcgatcccgggcttcttgtcgatggcgaagccctcggccccctccttgacgcagacgcctcggaggcccttgatggtcttcttgcaccgggggtgaatgcgatagtggcgctcgccgtcggcggtcatgaccagcgcgttcgtcgcgttgagcttgtccttgacgccccagggggagttcggggtgaggaccttgaggccgtgcttccggaggatcgtatggtcggtgacgccggcctcggcggacgtcttccggctgttgcccgtcgggtcggggcagaccacgaccttgcgcccctggaaccgctcggccaggtagcgccccacctcgtcggtgttgctgttcggcatgttgatctcgtcccactgcagcagccgcttgcccgggaggatcgagcagatgacgccggccatcaccgacacgttaaagtcgaggccgacgtagaccgtgccgccgttgtcctcggcgccctcccagatgttctcctggccgaagtcgtagtaggcccggccggcagcagcctcgaagctggcctcgtactcctggcggaaggtgcgggggtcgaggtggttccgggccttctcgatctcggcctcggagacccggccgccctggatggtggtgaactcgaagcgggcccattccgggtcctcctccaccgactcccagagctcgtggtaatggttgaagcccttcggggtggtgatctgccagcacggcccctcctggtccgacagcgccggctgcagcacctcggtccagagctccggcttggtgaacgccgcctcgtcgatgacggccccggacaggctgtcgccccggaggctgtcggggttgtccgccccaaagagcgtcagcgtcgccccgttccacaggtcgatccggagctcggtgttgttgatgccggcgacatatgtcgggtcgatcagcttcttgaggcgcttccaggcgatccgcttggccgcccggtaggtcggggcgacgtaccagtagttgccctccgggtgggacatgccccagttccggaggcggatcagggccaggtgcgtcttgccgaagcgccggccgcaggtgagcaggacgttgcgccggccgcacgtgtagatctgcgcctgggggccgctgagctcccggatcgactggcgctcatcaaaagctaggttggatccccggcccgaccgggagccgaggatcgtgccgccgcaggtggctgggaagagcatgtagcgggtacgacgcccatatcctccaccttaatagtggctctgttccgcagctgcaggacgagctcctgccgatcgaagcagtcgatctccgcctgcgcgagcatgccaagcaggtcctcgaatcgggcctcggcgatcgcccggtccccgcaccagaggcggcagtcggcccctgggtgagagagggcccagtctctcaaccgggccagccgctcgtggagcctgtggggcagcatcacgtcttcttgatcgtccgctcgaactggaacatgagctcgtcctgcacctccacatccaacaccgagtccatcaggcgccgtttcatctgctccatcagcaggtgctggacgtcgtaggcgtgggcgcccaggccgttgaccttgaggaacaggacggcctcggcggtgtcgcagaacttccaaagctctctggcctccggggccatggtcgcctcgagctcggccacctccgggacgatctgggcctcgatgccggccaggagctccttgagctccggggtcttgtggggcgtcggggcgtcgcccgtccggatctcggccaggtcgtggaccagggcaaactcgcaggcctggcggaccgtgtgctggggcatgccggcggcagcgccccagtcccggcacaggagccaaacgcgccacatgtgttcggcgatgttctgcgggtaggtcgtctggacgatcccccaccggctgatgtgggacgccctcaggcgctcgtaggtctcggtgatctggagtgtcatgggaaggagggggtatcggaaccggggatgtggcgcatggcgccgttatcggctcgggcccaggagcgggcccggttgatggcgagcttggcgcggatggcctcggtcacgtcgacgcccaggagcgtcgccaggtcgagggccaggatcaggacgtcggccacctcgagcgggtcgtgggcccggtcgctggcgatcaactccccgatctcctccaggagcttggcgatggtgcgccggggcggcggtcggggttcagggggtggatccaggcggcgatctccgcctggagctcagcgacggtagcgggcatacaaaccttcgagctctgcccgggtgggggtgtggtagacgtcggtgacttcgggccgaagccgacgtaggtcacctccgccctggcctcgatggcgtcgaggatgtcctcgagagccccgaggctgggcgggtactgggcgaagttgaggaacacctcgtccacgccgttctgggcgatggcctcgtgcgcctggatggcgctaaacgtaaagatccggcgggggagcttcgtcacggtggtgtactcctgctccaggcccaggtcggcgaactggcactcgaccgagtcggggtagcagggggcgctccactcaccggcctccgggcggttggccacccggatcgggtaggtccgcatcgagccgacgacccgggcgatccgggcgacgtcgtagggcaggccgcagtcggcgatcagctgggccgtcgtgacgtcccgggcggtgcagtaggggtaggccccgtggtggaccgacaggctgtagccctggcacccctcggcctggatcgaccgggtccgaaacagcatgtcctgggcggtccgggtgtcgacgacccggacgacaccgtggagcgggtgatcccggacggcctcaccgaacaggagcgtcccagggcggcggcggatcttggcgataaacgccgagccggcgccgctgcgggtcgagcctggggccaggcccccggcggcctcctcatcccggtgctcctggaggacgacggcggcgttctggtggacccagagctccacctgccgggggagggccaggtactcctctaggagccggtccatgtcgatcaccgagccggggcccaggtagatccgctcaaggctggggctggtgatgcccaggggcagcatcttgtggacgcgggcggtgccgtcctcctcgaccagggtgtggccggcgttggggctgggtgccatgcacagcacctgcggggcctcgagcgcccccaggtagccggccaggagccccttgccggtgctgccgtactggcagtcgacgatcaggttgcagttcttcacgcgatagtaggggggaatggacagcatagcacggccggggtcagccgtccaggatgggacgcctgggcctctcctcgatggccttctccttgaactggccccggatgtagttcaggtgtgtctgccggagcttctcggtccagtcccaaaaaccctgggtcatggcaggcaggccgccctcccaggtgctgtggatgacccggcggatgacagcatggagatcccggctgccgttgtctcggcggatgaatttgtcgaggccgtcgatgcgccaggcgaccatgcccaggatctcggcctctctttgaagctcggtgtatcctcgcagcttggtagcgatctgacgcagcctgacggcggcgtgggtgttgagactcacgggggtggagtggtggagtggtttgtacggggaggggccccttgcggagcccctgggatcgatcggtcagaacgggatttcgtcctcgcccaggacgccggtcggggccggcgcctgggactgccacaccgggggctggccggtcggcaccggggcgcctgcgtggagcgctgcgccgacctgggccggggtcggctgcggggcggccggaggggcgtacggctggcccggggagccgccttgcccgtaggccggggccgccggggccggggcctgagcgggaggggctcccggggtcacccactgctgggtctgggggttccacaccggctggggcggctgcgcggccggtgcgggtgccggggccggggcgggctggggcgtcacccactggccggtctgggggttccagtagggctggggaggggcaccggccgggggcgcctggggcgcatgggcctggggggccggggcctggcgctgctgctggggcaggccgaggaacgcgttccggggcggctggatctggagcgagatgtaaggcttgccgttgcggctctgcttcttccacccggagatgtagagcttgaggccgtactggtcggcctcggcccggttcgagaacaggtagtcagcgagggcggcgacgtcctgggccgtgatggtgcaggagccgctgtagtcgatccggttctggctgtcgtcgacgaacagggagccgttgagggcgggcagctggggggcctgggcctggggctggggctggggctggccgtagggggcttgcattgaaagagagcggttgggtgtggtcgtggtccggctcagaggccgaacgcgtcagcggcgccctgctggatggccagcgggggcgggccctggggcggcggcccggaggggccgaggccgaacgcgtcgttcgggtccccgctgtgctgcggggtgatggccgccgtcggctggggcgtcatgctgtcctcagtgtcggccgaggccatgccgaggatggccatcacagcgtaccggcgaaggtacgtgatcgtggcgcccagctgctgattggaggtgttgcgcttggtcggctcgtagaacaggacgaccgggagctccgaggagacgcaggccccggactcgtggtagagccaggtggagaggacggcgaccccgggctctgggccccggtcaaaggtctggacgatcgacagcccgagcttgttcgcctcccggacagccttgaggacggcgctcaggtcgacgtaggggccgaagctgccgtcggcggtgcgctcgacgacgctgtgctcggcctggaactgggccagcgccttgagcaggagcggcatccgtgggtcagcggaggtcataggggaactcgacgatggtgttctcgtaggcgggccagggctgatcctggccgtactgctgcaggtgctcggcgatctcctggaggcagatctcgttggtcactgcagcggcgttgatggcatcgtccgggagccggacgacccgggcggcgtggggcgcctccgactcgagcagcaccagcaactgcccctggggcggacggccggccaggcggaggaccttgaggtagtaggccgcctgatgatcgtagccgtagtcccggatcgaccacttgaacttgccattgctggcgtcggccgtggtcttgacgtcgatcagccacccggggctggtccacgcgtcgagccggatcttgagctccaggcccgtggtcgggtcgatcgcgaagaccgactcctcggtggagaccaccgtctcggcgatgcgcttaatgacggggtgcttgagggcgacgtcccgcatggctaacacctgctggtaggccgccggggggatcgtgagctcgtacttggcgtcgtgctcggcgtgggcctccttggccgccttcgacgtcttgggcgtcgtcagcgcctgaccgaccgccttctcgaagcgctccggctcgagcagggcgatgtgcagggcggtccccatctgcatcgaggccgagggcggcttcggtacgaacgaggggctgtacttgcggtgccagtagtggagcggcgaccggcggaagagcttgaggtcgctcgatccgatcgcggggtgggcgtggtgctgctcgttggtgagcttggggggctggggctggagctcctccggggtgggctccggggcctggggtgcctgggtcatcgggtcgcccggcacaggtcccggaactcctgggtcgtaagcacctgggtcccaccttgcggggagatagcagtacgggtgccgcgccgagggccacggtagaagcgccatccgaggtgccagaggcggtaggtctcttgagaaaggtccacggttgttgtgggattgtgggggctcccgcccccggtacaacgactataacatgccggctagcccgccacaatactgcccgctgcgagtagggccttccaccggtcccgggcccaggccgccggcccgacccggaccatcagtgcgtcctcgcccaagcagctgtgctcgaagacgatggcgattcgcccagcccgcaggtcgtagaaccggtgccggtgcacctccccggggaggcccgaccgcacgagcgttcccttgagctcccagtccggggggatgtccgactcgctccagcagctggcctcgaagacacccagctggttgtggacgggggacagctgtttgaggggccattcattccgcatagccctatcctaccaccgtggggtgggggccggcgacgatctcccagcggttgcggagccggacctgatggccggccatccagttgtgcagtgtcttgcgcgggatgcctcgcctgtcgccccaggtcagcatccgctcgatcggcacccgcaccggggccgccctgggggccaggacgtcccggatcacccacaccggggcctggctccggtcgatccgctggccaacccgcgtctggatccaccagatccagatacccatgttccggcggctagtcatcccgatcagttcagcggacgccagccgggccagggcgcggtagaaggtggccctgggcaggtcgaactctgcggccatctcggtcagcgacggccaccacccgggcccatggtcggccaggcggctccaggtcagcgacaccaccggggaccaccgggaccgatggcgagcgagcaattcaggctgaatcggcaaggtatgctaggatgggtgcatgccactctacaccgatcaggagcagctgttgaccgacgcccgggcgtcgatgctcaagggcaacaagcgcgtgctctgcgtcctccccaccgggggcggcaagaccaacaccttcatcgaggcggccaggcggaccgtggagcggggcaagcgggccctgatcctggtgcaccgccgggagctcctccaccagaccaacgtccggctcatgaagtcgggcatcacccccgggccgaaccggggcgtgtacgtctcgacgatcggcaagcggacccacttccggccggacctgctgatcgtcgacgaggcccaccactgcgtcagccccacctgggcccggaagatcgacgagtacgacgtcccgctcctgggctggaccgccaccccggagcggctcgacggccggggcctgggcgaggtgttccaggacatggtcatcgggccgtccgtcgccgagctcatggcgctcaaccgcctgtcccggtaccgcctgttccacccgcccccggacttcgacccgggcagcgagcgggccgtgttctccggggtccgcaactggaagacgttcgccgacggccggcggacgatcgcgttctgcatctcgatcgagcatgcggccaagacctgcgaggcgttccgggccgtcggtgtggcggccgaggtgctcgactcgaaactgtccgacaccgagcggctcgagcggatcgcccggttcaagagcggcgagacgatggtgctcgtctcggtcatgctgatctcggagggtttcgacgtccccgactgcgactgcgtcctgctgctccgcccgacgtcgtcgctgtcgctctacctccagcaggtcggccggggcctccggttctccggtgagccctgcgtcatcctcgactgcgtgggcaactcgcagcacccgaacctgggcctgccggacgacttccaccactggtccctggagggcaagaaggtccgggccggccaggacggcacggccccaccgctccgggtctgcccgaagtgcttccaggtccaccgcccggcgccggtctgcccgttctgcgggtaccggcacccggtgcagtccgtcgtaccccgggaggtggatgccgtcctccaggagtccaccgccaccccgatccacaccgtgcccaagcgggaggtcatccggaacgcccggaccgaggaggacctgcgccggctggcccaggagcaggggtacaaaccaggctgggtagacaagatcctggccgcccgtaatgcgcggcgctagtatggttgtatggcacagcgcgaaaccatcctccaaaactggattcgcctggaggtggcccaggccatggctccccacgtggtcctattccggaaccacaatgggagcctccccgatcctcggaccgggggctggatcaccttcggcctgggggagggctcccccgacctgatcggatggcgcgtcctccagatcggcgccctcgcccagttcgtcggtctcgaggtcaagctgcccggggagaaggcccgccccgagcagcagacctggatcgacaacatcaacgcggccggcggccttgccggtaccgtcacttcacccgaggaggccatcgctctcctgtccagtcccccctatcccttcgaggtacaccatgccccccgcaaccgcagaggcccccgcccgcaagacccgctcccggaagcccggcctcaagccagtcctgctctacatgcccgaggccctcgtcgagcgcctcgatcgggcgaaggaccaggaccggcggacccgttcggctgagatcttccacctgctcgaggccgccctcgacgcccgctcgatcggctgatcgaaccacgggccccgtacagtgagaggccccccaggattgctcccggggggcctcaacactgcatgaccgcctgccacagcggtcatacccttactccacctcagacactatagcagatgtcaacccccgcaccagccttcgaccgggaccagatcctcctccacctgtcgctcctccggaaggacatcgccacgacccggtaccgggcgatctggcccaggcgagaggacaaggtaaaagcctggacgacgcccctgaccggggccacggtccaggacgccgtcacccagggattcaacagctacatcgtcgtaggcgacggcggcgactccgacgccgagatcaccagtgtcaacgccatcttcggcgagtgggacgacggcgacctggcctggcaggtcggcgcctgggaggcctgcggcctgccgcggccgagcttccagctgcgcaccgggggcaagtcgatccaccactactgggtgttccacagccctgtggacgtcccggcctggaccgagctccaggcccgcctgatcgccctggccggcttcgacacgacgaaccggaacccctcccgggtgatgcgcctggccggctgcccccaccagcgcaccggggaggtggcccagatcttcaacgcgaccggggagctctacgaccccgggcagatgctgcaggtcctgcccccggtgccgatcgacccgccggctgccgccccggtggccccgggaggtgcccccagttcgatggacgacatccgggccgccctggcccagatcccaccccgtcccggggcagggagcggcacctacgccgagtaccgcaacatcctctggggcctggttaaggccgtcgaggaggccggcggcacccgggaccaggccgtggccatgatgcaggcgcacagccccgagggctgggattgcgcccaggtggcccgctccgggggcaagaagatcagcaccgggacgttctggtggcatgcgatgtcctacggctgggcaccgccgaagaaggccccggagccgccgccccaggcccgccaggtgccggccgtggccgccgtgctccaggccgcagaggccgcccctggaaccggcaccgagcacggcccctgggcgccgctgcccccgggctggcagggcacgaacaaggagggcctgcccagggcctcgcagatcaccacctacgaactggccctgctgatgcaggtctccctgcggggggtgctctggcacaacgagatgtcaggcgaagtcatgcacggcaagacggccctctcgccgatcgagctccagatcgcctacagccggctcgagggcctcggctacaaggtcaccaaggagaacgccaagaccgccatcctgcaggcgtcgatcgccgacctgcggcaccccgtccgggagtacctcaacacctgcacgacgcccctgcccgacgaggtctgggccgacatcgccaacgccctgctgggccccgggcacagcgcgttcgactccagcgccatccgcaagtggctgatcttcgccgtggcccgggtcttccagcccggctgccccttcggcttcatgctggtgctggctggcgcccagcagatgcacaagacccggttctttaacaccctggcctcagacgagtggttcctgggcggattccagcggggccgctctgacaccgacgacctgattgccctgcaccggtcctggatcaccgagtggggggagctcgacggcggcctctccaagcacgacagcgccgagctcaaggcgatgatcgaccggaaggtggacgtgctccggaggccctacgccgccacgcacgaaagctgcccccggagcttcgtcctctgcgggacgacgaaccgccgggatgggctcttcaccgacccgaccggcaacaggcggtacgtggtcgtgcccgtcaaccagcggatcgacagcgagcgcctggagcagatgcgagaccagatctgggcaaccgccctccgggagtaccgcagcggcaagctctggtacctcgacgaggaggagctggagatcaacgcgaaacgcaacaagggccttgaggtggaggacgcctgggtggggacgatccagatgcacctgaatagctcgatcgacctggagcggctgaccgacgggcgctacggcatcaacatcgagtcagtctacctcaagatcgagcccgaggtgggacgccgtggcccgggcttcggaaagcggatccgggacaccatgctgagcctgggctgggagcccgtgcggctgcgtctcgccagcgacccgagcggcaacccggtgaggcgttgggcgcccgtccagggggggtagcacaggggatggtcggaacggtggcacagggcgacacagtccgtgccactgtgccgggccgtgccgggggggtccgggaggggttggcacctcgaatctgcccgtcccacggcccgattccccctgttgtgctgttgtgccaccccccccctaggagagagagaaaaaaagggggtcaggagtaacagggtgataccggggaaccggggaacgggggaaaggaggagcgacagcacggcacgacggcacagaccccctgcgggacccccccaccgggccgtcccaccccgggactcagtcgagaccgggcccctcccgccgtgctatactggggatgacaacgacgcaatcgagcgaccatgctgttctccgacatgcccgaatgggagggcgaaacacccccggacctgtctgacgtagccttcatgctcttggaaacgctgaggagcctggagttgcgcttctttagcgaccgcctgcctggcaccacccagcacgaccggatgctggccaccgagtacgtgaatctctgccggcatggctggacgatctccaagagtgacctggccgacgcgatggtctgggccgaagaaacgcgggcctgggagctccgcctcaaaggatgacgatcgaagacctgctggccacccccaccgaggtggcccaccccgaactggcggtgtcgagccttcgttgcgccctccggttccttgatccccacgagatgccgacgtctctggcctgcgtcgagcagcccctggcggccaaggggtacgtgctcggcaggaaggccgtcaaggtcgcctggcaaagggcgatccgggccgagctcctggagcttcgcccccactccaagcggctcgtcttgaggaacctgctccgtctgtcgtagcgtattgtccgggggtattgcgccctgccgttcgggatgctataatacgttcagaacacaggaaaaaccaatggccctcgcctccttcatccagaccaccgacctttccgccgccacccaaggcctggtcattcgccacctgcagaccgcgatctcctgcctcacccgcaccgagatgcccaagtcggccaccgaggtgcaacaggccctggccggcgccggctacgacgccaccaccgaggaagccgccgagctctggaccgccgccgccaccgcccaggtgcccctggcctccaatcgcacccgcaaggccctctaccgggccgtcgccgtcctgccggtcgcctgacccgccggccaaacgaggggggccctcccgggcctccccggttatactccgcccatgactcaggtatcgatgtcacggcgggaccaggtggagcacctggtagagctactgcgcgaaggcgggcagaagtccgtcactgcgcacctgatgacggtctgtctggacgagttcggcatctcggcgccggaggccttcaagcggatccgggacgccaaggccaaactggccaccggcctcgatgcggtggaccggtccgaggagatggctgccaccctggcccgctgggagtcggtctttgctggggcgatgcggagcgaggactggggctccgcctgcaaggccctgcagggcatctgtaacatgctggggttaaaaccttgacgaggcccgatgcctgccaatcaaatctgggtgcccggcccctggggccccgacctgggccggtacgccgaggacgtggcgcccgaggcgccccccaccggcaaggccgccggcaaatccaagagtaaggccaaggcgaagcctcgtacgctgactccgtccgcgaatcagcccccgaatggcagcgcaaaccccgaccccgccagtggcggagccgacgcctgaggcagaccccgctgcgccagtggcgcccagcggcgacgtcgcccagcagctgtctgcggcccttgccaagctcgacctggtcaaacaggacaagcagcgcctgggccagaccaacaccgagctcaaccaacgcctgaccgacctggagcgccagcttcgggagcagaccgaggccaagctcgaggaccagcagcagtacaaggccctttgggaggcggccaagcagaccgtggcgaccctcgagaccgaggtggccacgctcaagacacagatcgagaccgagaaggaaggccaacagcgcgaacggctcaagtcgtccgccctggccgtcttccattctgccggcgtggtcgctccggagcagctgtacaccatccttggtggcggcatccggcagaccgaatccggcctcgccttcctgcaggggggagtcgagcgggacctggcccagtacgtggccagcctcaaggcgcccaactccggattcgagcaccactttgcccccagcggtgggcgaggcatgggcaccccggtctctgcggcccccgtcggtggcggtggcagcgcagcagaggacgtctccaacccctggaccaaagccggctggaaccggaccgggcaactggcgctccaggccaagaacccagagctcgccgcccagatgaaggccgcagccggcgtcacgtaaaccaccacctgagaggccaccatggctcaagcagcccacctgggcaacttcgggggtttcaccacccccacccccgtcggcatcggctcgagcgggtcccccaactggggcaccacgttcgcaggcgacctgggggagctcgccaaccgccccgagttcggggccgccatccgtgaggaggtgttcaacagcttcgcctggatcaactccggcgcgatccagcgcgacgaacggctcgacgcccgcaaccggggcgcctcgatcagcctgcccctgatcaacccgttcatccccacgtcggagacgatcaagagcaacagcacctggggcgccagcggcaaaggctacctgaccccccagaagctcaacgccggggactggaaactccccatcgtgcaccggggcttcgctgccggcgccgacgagctctccgagatcatcaccggcatcgacccgatggcggccctcgagtcctacatcgtcgccggggcccagcgcctcgagacgcaacgggccctggccaccatggagggcgccctccggggccccctgtccaccacccacgtggttgacatcagccggaccggcaccggcccgagcgacgcggacaacttcctgagctcttcggtgatgctccggggtaaggcccggctcggtgagcggggctccatgctccagatcgcggccatgcacagcgatcttgcgcactacctggagtccgtcgggatgctgaccttcagctccgacagcctgaccgccgggggcgagatcaagtggggcggcggcggcatcggggtcacccaggcccgcgttgccgacatggctggcttccgtgtcatcgtggacgacctgctcgccccgacgatcgacgccaccaatggggacaagtaccccgtctacctgatggccaacggcgccatccggcagggcatccagcgcgacttccgggtgcgctacggggagaacatcctcagcttccaggaggtgctcgccgccgactggcacggctcgatgggggtcctcgggatctcctacgagtccaacgccccggacaaccccgaggacgccgacctgatcgatcccgacagctgggagctcgtctacaccgagccccgcctggtgccgatcgtcaagctggtctgcaattcgccgttcgctgtcaacccctgagcccctggggtaggatggcaaggccacgggacgccgtggcccccaacggtcggccccgtctcccaccccggaggcggggccttcctatgttggggcggtgctgtgccccccgatggagctcctccccgttgacctggccgacgccgacgcctacatggctctgggcgcccggggccccctctggctggccgtcggggacgaagccgcccggcaggtggccctgaccgaggcgttccgctggctccagacgctgccgatccgggaccgcccgacggacgcctgcgccaggccattcgacgagtgctgggtgacggcaaacgccgaggtggccctggccctacaccgcgattctgcagccgtggtccccgccggcagccaggccgggcccgtggccaagagtcaggccctgggcgccctccagcagtcgttcttctcgatggccgagtggaagacccgctacgaccaaaacgaccaccccctgctgcgggccttcccctggatctactcgatcctgggatgctggctgccgagcaagtccaaagtcctgcaccgggtccgcagctgagtagcctggcggtatggacgttaccgccaccttcctgcctgtcgcggcccagctgatcgacaggaccttccccacgccgatcctgtaccggcgggcccagaccgagtcctacgacccggccacgggggtgctcacccgggacgtcgtcgagtacccgatcaatgccggggtgctgggctatcgcaagagcgagcggagcggcgccgaggaggcccgggaggtgcggctctggatccaccatgggcccgggggcctcccggacgaaccaaccaccggggacaccgtcgcctacgacggcgggatctggcgcgtcacagaagccgaccccacctacaccagccagggcctgatcgccagccaactcgtttgtgagtaccagtatgccgacgtttaacgatcccgaggcgctcaagaagcacctgtccgaggccctgggcgcccagctgcgcctcaccgtcgtccaggcccaggccgaccttgggagcgccgcagtgagccccgtcgacaccggccggttccgctcctcctggttcgccagcaagagccggccctcgagcgaggtggccccggagggcgccagcaccccgcaatccgacgccgaggccctgcgcctggtggccggcgacgaggtgcacctgaccaacagtctgccctacgctgaagccgtcgctgtcgaaggccgagtcgtgtcgaagcccgccacctggttccggtccttccgtgaggcccggttgcccaggatccaggacgccgccggcaagctcatcaagaagcagtacgacctgtgatgtccttcgcccccatccgcgccatcctcgagggcgacgtcgccgccgcagtggacccggtgtcagtcgtcttcgacaacaccttcgagacgcccccgagcctgccctacgtccggttcaccgtcagctttgacgccccgacgtcggacgccatcggcggcggcatggcctcccacgtgaccggggtggtgcaggccaacgtctacgtggccaagatgacaggcagcctgggcggggagctcctggcggccaagatcctggacgcctggcaggacctggccgctgcagccgtcgtgccccccgggtggcgcgtcgtgccccgttccctggaggggccgcagaccctggccccggataagcgggaggcccacgtcgtggtcgtcggggccgccttctcggcgacgctctacgagacgccctaatctgggacgacgtcacccctaggccccagatgcccgtcacctgctcgaaaaccctcctgtcggggatcgacgggtcggccgcgttcatccccgccgctacccggcactgcctgctcgacaacaccgatttcccggctggtaccgagatcacggtcccggccgaccacgactacctggtgggtgatcccgtcacgttcgaggcccagggcaccgccgtcctggataccgccctgaccgagggcaccacctactacgtggtcaccgaggcccacggcgccagcccccacatcgaggtgtccgccaccgcagggggcgccccgatcaccctgaacggtgacggcggcaccggtaccgccaactccggggccccggcccagaaccacatcaagatccagttcgctgcccacatggccctctgccaggtccagggctggaactgcaacctcagccgggaggaggtcatgaccacgagcctgcagtgcgggccgacgaccgacaacggcgccaatgccccgttcatgacccgccaggccggctacgtcgacggctccggctcgatggtggtccgcttcacccgggaccaggagtcgctgtctcgccgcctcctccgcaacagcctccggaagaaccaggacggcgcctcggtgcagctgttcgtcgacacggtctacggccccagcggcaccatcgacctggccggctccgagttcatcgagggcccggtgtcgatcctgggcttcgccctgggcgtaaccaccgggtcggagcccacccagggcaccgtcaacttcagtttcagcgaccagcccaccaacatcttcggagccctctgacgacatgcgagcgatcgacctgctcaaggcagaatccaacctccagacgctcaagcggcacctgatcaccttccggtccggtgccacgctcgagatgtacaccaccccggtcaccctggccgagcgtcgccaggccgccgagaacgccaagagcgacgagcagctggaggtcaacctcggcctgctgatcctcaaggcgaaggacgccaacggccagcccctgttcgcccccggcgacctggcccagctgcgccggtccgtcagcgccgagtacgtggccgacctggtcaacgcgctctactcgacgcctgccctggacgagggcgaggcctccgacccaaagccctcctcgcccagttccggcaagacaaacagctccagttcgaactgagcctggcctccgagctcgggatgacctggggccagatgcagcaggacatgaccgaggccgagctcgccctctggcaggtccgggcccgctacctggaggaggagcgcctcaggtctccggtctgacctgggcaggcggctgcgaatagacttcgatcagcggctgggcggttgtcttgacaagcaccccacaggccgtgaggatcagcaccgtcgccaccagttcacacgcggttaaggtcctcatgcccgcaccgtagctaagctgccggcatgagcaccgcctaccaggtcgatctcgtctttggcacccgccaggcggacacgcagcttgcccggatggagcagcggctccggggcctggaacgggccggcgggaccgccgggggccgcgatgtgttcgggccaatgggcaacagcgcccaggccgccaccggcaagatcgacatgctcgtggggggcctccgggcattcgccgccctgggtgtggtcgccaccgccggggccatggctaactcgatcctgcagatggggatgcaggccgagaacaccgaggtgcgggtccgggggctcactgccggcctggacgactacgcccggttccaggaggtggcccaggaggccgcagccaagttcggcctctcgcagcaggcggcccaggccggcctcgcgcagacctacgcccgactccgccccctgggcttcaccctgtccgaggtgcgggacgtctacgagggcttcaacacggcggcccggaacggcggctcgacggcccaggagagcgagggcgccttccggcagctggcccaggccctgggctccggggcgctccggggcgacgagttcaactcgatcatggagcagacgccggccatcggcatcgaggtggcccgggtcatgggcatcaacgccgggcagctgcgcgagatggcggccgagggcaagctcaccggggacatcgtcctcaaggccctgcagaacatccgcaccgagggggccgacaagctggacgcctctctgaacacgaccagcgccaacgtcgagaagctgaaaaaccggttcatcgacatggggacggtcgtggggtctggcgtcatgccaccgatcctccggacgctccaggccctaaacctgctgctcgaccaggccaccaagaatgccgacggcctgggcttcgccctgcagcaggccatgggtatcgccggggggctcccggtcaacctgggcatcggcatcggcaacgtcgccggtcgcatccccgggggccgccaggcgatccagggtatcggcagcatgctcggctaccagcccgagaaacagaccttcggcccgttcatgccagaaggcctcgagcagcgcagccgtgcccaggagcaggcccgcatccggagggagaaggaggccaaggacgctgctacgaagagccgcagccgtggcggtggctcgagcggccccgacttccccgcctacatcacagcgaaccagatgcgggactggctccggagccaggggtacgagcggacgagcggggacttcaccaacaaggggcaccggacgcccaaccacatgcttaacgccatcgacatcggcgagctcgatggctcgtatgccttcgccgtccagcgggctaaggcgctcgaggcccgcctgagggcgaccggggcgttcggcaaccagctgttcggcccgactcgggacccccgggggcacaaggaccacgtgcacatccccacccccggcggccggatccgggtcaccccggggctggcccagctgatggggctcaacggcaagggcagcggcgggatggcgatgcagggggccgagtgggcaaacgaggccgcagagaaagaggccgagcgccagcagaagcgggaggacggtctgcgcacgagcggccgggccctggccctggcccaggccgagctcaagatcgcccaggccagcaccgacgagcagcggatccaggccaccgcagacaaagaccggatggaccgaatgtacgagttcgccgacctgtacagggatgccgtcaccgaggaggagcgggccaacatcgccaaggcccagggagtcgagatccagcgccagcaggtggagctcgccaagtccctgggggacgccctggtagaggtggcccggaagcaggaggcggccatgcgcccccggctcgacaacatcgagcggctcgaggccaccctccgggggcccgacgcggtgcgggccctggagcgccggaacgccgtgggcgagatgtcggccgccggggtgggcccggccagggccggcgagctctacgaccgggagcaggccctcgaccgtcaggtggagcggcaacgcgagctcaatgccctttgggaggaggggggccgcaccctgggcgggctgttctccgacctggtcaagggcaccgacgactggcaggccagcctcacccgggcgctcgaatcgctggcgtcggtgctgctgcaggcgggcctccggggcatcgccgagaacaaccagggcgggttcctgggcggtctgctcagccaggtgatgggttcgttcgacgggggcggctacaccggctccggatcccgcaccgggggcctcgacggcaagggcggattcgccgcgatcctacacccgaacgagactgtcgtcgatcacacccgggggcaggcggccggcggcggcatggtcaacgtcggcgggatcacggtcaacgtcgccagtgacgggaccaccgaggtagacgccgccgggggcggggagctcgcccgtggggtccaggcggcggtgacggccgagatcctgcgccagatgcgcccgggaggcgtcctggctgccggccagcggggctgatgcccccggggaaggagaggcccctccccggggctccccggtgtcaccgggccagcatctgacggacccggtaccgggtgacgcccaggcggtcggcgatcttggcctggctgaccccggagcggtgccagcggcgggcccggtcggtcggggtctcggtgacccagagaatgacgccaacgaagacggcgacgatcgtgaccaggatgcagaggatggtgttcatcggaggaaatgctgtgggaagagcggcgggagcatccatgctcgaccgccgatttacccagtatagcatacagaagcggctaccgtgggggcatgccggtcagctgtaacagtcagatcgacctgggcaccctccgggtgcaggtcaccgctacggggcagacgtcccagcgcatccttgcggtgcagttcggggacgggtaccgggagcgacgccccgatggcatcaacaccgaggtgcggcgctggtcggtctccaccccgcccatgggcatcgcggacgtcctggagctcgaggatgcgctccgggccctgggcaccggggcgttcgcatgggcgccccccggcgaggacgacatggtgctctgggagctcgacccggtcgagtggacccgcacctaccaggccgaccacctggcgagcctgtcgtttgccctgcgctcggccaacccatgagcccggtccccatcccagacatcgagcagctggcgggactccaggacctggatgccgtgatcgacctgttcatcctcgacctgtcgatcttcgatccgggcagggcgccctaccggttctgcaactggagccagagcggcggggtcggcctgttctacgacggcgaggagtacgagccgatgccggtcgagtgtaccggcttccagatcaacagcaacagcgcaccgagcgagccccagatgcgggtctccaacgtcggcctgacctggaccggcctggtcaacgcctgggatgacctggtgggggcgaagctgatccggcggcgggtcctgcgccggtacctcgacgacggggccacgcccagcccgacaggccactggccggacgagccgtggttcatcgagcgcaaggtcgccgagagcaagctgaccgtcacgttcgccctgtcgacagcgttcgccctggacgacgtccggctgcccaagcgcctggccctgcgccacacctgcagctggacctaccggggcgagggatgcggctacaccgggtaccccgtggccgacgcccggaatcagcccctgcccccacccatggacccggcgctccaagcgttctacgacgcggtggccctgttccgggcccagacccccgtcgtccaggcggccgaggctgcagtggccattcaagagaacgcctacaacaacagcatcgaggacagctggtcccgcctgacgacggggtacaaccgcaacttcccctacagcttcgtcttcacgtacccgaccggctcgctccaggcgctgttcggcgtcaacctgatctactccgggggcgtcctgatccccgccttgaaccagacctggcggaggggcgccatccgggcccaaaacttcgacggctcggcctactacgagatcgagcagtggcagttcaatccgggcaaccgggcgaccgccctggcgaacctcaactctgcccggtcggccctggcggctgcccgggccgtgctcgagtcgaggcgggccacggccctgtcgctcaaggcggcggccgacgccatccgggacccccgggaccagtgcagtaagacgatcgccggctgccgcctccggttcttcgatccgctgacgggcgctacattgccgttgccaacatcggcctttccagggctccagatcgggtgatccttaccgcactacagaagaacgacatccggatgttcagccgaggtggcctcgtccaggaggcctgtggcttcgtcctgggcgacggccgggtggtccggtgcctcaacacccaccccgagccggagaacgctttccagatcgacccggaggcctacgcccgggcagacggggagcatggggtcaccgccgtctggcacagccacgcccggctcgatgggttcagcccggaggaccaggccgccatccgggccgacggcgagctcccctggatcgtctactgcctgcgcaccgacgagtttcacgtcgtggaccccctagaccacgggcccctggtcgggcgctcgttctgctacggcatcctcgactgctacagcctggtgcgggacgccctggaggagcgccatggggtggccttcccagagtggcaccggggcaactggggcgagtgggggcgccccgacttcaccgtgttcgacatgcaggccagcgagttctgtcggcgggtaggccgggagcggctgctgcccggggacatcgtcttcatgggcaaggaccacacctcgcacatcgggatcctcgaggacagcgaccgcatgctccaccacctggccggcaggcggagccgggtcgagtactacggcgagtggtggcaggcccggacccgttcgatctggcggccggcgggatgccagcccaggtgggcagccgtaggatagggccacagtcgcgaggcgctgcgcccatgtcgatcaccaacgacgagctccacacccggttcacctaccaccccgtcaaggaggggcagacggaagtctaccagcagatccggcacaaggcccgggagctcgccgagctcatgctccacctggtgcccgaggggcgggagcagtcgactgccctgaccaaggtcgaggaggcctgcttctgggccaatgccggcgtcgcccgccgcacctgagcagatgaaccagcgctacgtcacgatcaagctcctgggcgccttcggccgagagttcggccgcatccaccggcttgtcgttgagacgccggccgaggcggtccgggccctctgcaccctgtacccggccttccggccccgggtgatcgagcaggccgggcggggcatcggctggcggatcgtgacggacgatccccggggcctggacgaggaccgggcccaggcgggcatccccgggcagacgctggtgtttgccccgatcctgaccggccgtggcggcttcgggcggatcctggccggcgtcgcgtttatcgccctgggcgcgttcaccgggggcatcggcttcctgggcctgtcgtcctcgagcctgctgctgaccggcggtgccctggtgctggggggcgtcgctggcctcctcaccaggacgccccgggcgccggtcgatgccgacaccaagcagctggagtcgagcctctacagcaacgccgccggcacggggggccaggggagcccggtcccggtgatctacggcctccggcgggtcgagaacccgctcgtgatcagcttctccttgggcaacctgccgatcagccgcccgatcaacgtgagcggctcccggggtctcctgggcctcgttgcggggcagttcgtatgaagctcatctctggagccggcggcatcggcggcggcgggaccaagaagccccgggcgcccatcaccagcccggacagcgccttcctgcgctcgatcagcttcgcccagatgcagttcctcctgtgcgaggggccgatctgggggccgaaggaggggcgcagctggggcggcctcctggccagcacctacctggacgacaccccgctgtccgtccggggcctgggcggcacggtgcccgtagaagacctggtgctgagctacggcaccttcgaccagacggcggtcccggggtacggggtccagtggaacaccatcggggtcggccagtccgtcaaggcatcgttcccggtgttcgccacggcgatgcccagcgacccgaccacccagcaccgggcccgggtggtcctcacctgggaggcgctgctcgtcgcgttcaagcagacgggcgacgtcgtcgaggcccaggtgccgtacctgatcgactacaccgacgccaacggggtcgtccgactcgtgttcgccggcttcaccttcggcaagttcagcgggccgttccagcgggagcacgaatgggacctggccggcccggggccctgggtggtccgggtcatgcggatggccgcagacgacgacgccctcgaaacgccgatcgcgtcgttccgctcggcgttcagcttcacgaatctcagctttggcccggtgctgtctctggggcgccggtacagtgccacgctcaccctggccgcccgggcggaccggtactccaacctgccggcggtcgccatcgacctgtacggcaagatctgcaaggtacccacgaactacgacccctgggccggcacctacagcggggtgtgggacgggagcttcaaggaggactggaccgacaaccccgcctggtgcttctacgacatggtgacgaaccccaggtacggcctgggcgagtcgatcgatccggtgctgatcgacaagtggtccctctattccatcggccagtactgcgacggcctggtgcccgccgtcggcggggggctggagcggcggtttcggtgcaacctgatcctggccgcccagaacgacgcctgggtggtcctccagcagctggcgtcgatcttccgggggcagatcttttggagtgccggcctggtggtcagcacccaggacgcccccggggacttcctgtacacgttcaacccatccaacgtcgagcagaccgtcgacgactctggcgcggtcgtccagccctgcttcgagtatgagggcacggccaaacgcacccggcacaccgtctgtctggtctcctgggacgacccggccaacgcctaccagccccgggtggagtacatcgcggacagcgatgccctggcccgccttggctaccggccgctggagctccggctcaacggcatcaccacccgggggcaggccctgcggacggcccagtgggcgctcctgtcggaggcgatcctggacgacacggtgacgttcaaggtgggcgccatcggcatggccctgcgccctggggatcttgtcaaggtcatggacccggacaagggcggggtccgcttcggcggtcgggtggttgcccaggacggcgacacgatcacgctcgacgcggcacccccgacacccctcgccggctgggcgggagggctgttctattggcagtcgggggccgggctaccccgggtcaacgtggcgggggtctccggggccgtcgtgacggtctccggctggggcgacgacagccggcccacccccggcatgccctggctgctggaggtgcccaacctggaggcccagccgttccgcatcctgggtatcgaggagctcggccagaaccggtacgccgtcacggccctgcgctaccggtccgacatctacgaccgggtggacttcgataccccgctctcggacgacgaggactacctgttcaagctgctggacccgctgcccccgacgatcctgaatgcccagatcgtctgggacaacagccaggccaagctcgaggtcaactggcgcccccaagaccgggtattcgtcgatggcggtttcgacctgtccacctcctaccaccggctccagtaccagcggggcgaggtcggggctggcggggaggtcacctggaccaatcagtgggcggaggtagaccgacagaccgacaccaccgagacgatccccctggtggggtaccaggcgcagacccggtacaaggtccggatggcgtcggtgggcaaagccggcgccgagtcgctctggtcggcggagcttgaggccacgccgctcgaggtgtggttccctatccccgacttcgagtcgatcgtcccgcaccccgggggcgagaccggcccggctggcgtcctgtcgcacacgaacctggccactggcggccacctctggacctggaagatcttcacccaggtgccgccttacgcccgctcgatcgaggtgtgggggcggcccgtcggggtgccactgcccgacggcgtcaccaccgacgaggacggctacatccttttgggcaccgctgccccgaatgccggcgtcgaggccctgctgcccgtggcagctacctgggacgtgcgggcccggctgaccacgtttgtgcccggcctggaggggcggtcgttcatgctcgacatggtggaccgcctggagatcgtcccccccacccccaccgagttccgcctggtcaccgagcaggacggccagagccggatgggcagccgccggttctcttggctcatgccggacccgccaccgttcgccgagcgctggggcggcggcctggtgagcgacatcgccggtttcgaggtgcgctaccggagcggcgtcgatgtgggctgggagggcgctttccccctgctgtccgacggcgtccccggggacaccttctggttcgagacccacctgatggactacgggaccttcacggtcatgctccgggcccgggaccggaccgggtgggtctccgatgagatggcggtcgtgacggtgggcatcggccagcccctgcccaccaacgtccttacgctgctcgacctgtcgctggagggctggcctggagatctggcaaacggcaccgtggtcggctcgactagcccgctgttctacttcccacccaccaccgaggacctgtacgaggcgcccctggaggaggcgatctacagcggccggagcggcggtgagctcgtccagaacgacccggcccagcccatggtctaccgggccctgctggaggtggaggtagacggcagcgccctgctgatctacacagaatccgacaccgggtcgtaccgctggcggcttgaggacatcagcacggtcggcctggggctccggtacgtcgccccgacgaccgacccgatgtacgacgtcgccgaggaggcgccattccacctgggcgagttcctgagcggcggggcggggctccacccctacgccccccaccagaagctgaccgccggcctgtggcagatcagcctcgaggccatcgccagcactaccaacgtgcccgcccggatccaggacgtcgatgtggtcctcgacgtgcccgacgtcgtctggacgatcgaggactacgaggccggtgtgggcgtcacatcggtcccgctgccaccggggctgttccgccgggtcaaggcggtttcgatggcggtgcaggacgacaccgtggccgccggggtggccgtcggggggcgcatcgtctacaagggcaccgaccggatcgacctgcggacggtggacgcctccggggccgacacggcggccctggtggacctgatcgtggtcggctactagtcgctacagtgctggcatgaccaacctgccgatccggggcgaaaccgacagcctcgacaacctggctgtcacccgggaggagttccgggtcggcatcggccagctgctggagtacctggcccaggccctgggtggggtggacaccacctacgaggatcagcccgtcgatccgaccgcagtcgtcctacagggcgagccggtgctcgacatcgacgcggtgccggaggcggccgacgacagcctgcgggtgccctcgacgtcctgggtacaagacgagatcgcgggcctcctcgacgactacgtggccaagaccggcggcgtcatgaccggcgacctgcgggtgcccagcctcaacggtggggcgctggccggactgcgcaacatgctgatcaacggcgatttccgcatcgaccagcggaacactgggggcgcctatggcctgacggccggggcagctttcatctacggtgccgaccgctggctcggcttctgcagtggggccaacgtctcggcgcaacgcatcacggtggcgggcacccaggttgaccccaaccgtatgcagttcaacggggcagcgagcgtcactgccatcggcatcgggcagcgcattgaggcggccagcagccgccacctggcgggcaggcaggcgacgctctcggccaacttcagcaacagcctcctcaccactgtttcgtgggaggcgttctacgcaaacagtagcgacagcttcggcacccgggcctcccctacccggacgtctttcgcctccggcaccttcgcagttacaagctcctacacgcggtacagcgccaccttcgatgtgccggcggcggcaacgactggcatcgagatcgttttcacagtcggggcgcagacgtccggcacctgggtggtcggtcaggcgcagttggaagagggggtccaggtaacccccttcgagcggcgaccgcttgggctggaaacagccctttgccagcgctacttcacgttctttccggtcaacgtcagggcggcggccccaggggctggggccctctacgctcacagcgtcagcttcccacagcggatgcgggccaatccgacgctgggctcaatcgtgcccgatccggaaggccctggggcgcttaacttgaacggcgccggcatcaccgtcacgggcgcgaccacctacggggtcctggtgcagatggtggtcaactcccccggggcggactcctactacctgcacttcagagcctccgccaccgccgaactatgagctaccgtctgaccgattccagcagcgtcgtccgtctcgccgacggcgccaccatccccgccgacccccgcaacaccgaccggcaggaatacgaggcatggctggccgccgggaacgtcccggagcctgccccggcaccgggggcgcccccgctcgccctgggcgattggggggccttcctggagctcgtgatcgccgccccggtctaccagacgatctacgcccagtcggcgcagtcgctgccggtgaataccgccttcaccgccatctcgggggccctggtgttgggcgccggggggcgccccaacctggccggcctacagtcgggtgttgaccagctgctgcaggctgcggtcctgaccgccgaagacctggaccagctgcgcgacatcgccgagcagaccggcatccccctgcagatccccacccccaccccgcaatgacgctccaatccctggtccaacagatcagcccgctccccgccccgaccggtgccgatgtcggcagcctcgaccccctgggcgtggtcttcctggtgctgttcgccctcgacgagctcctgcccttcctgggtggccggttcaagcggttcaacggcgtcctgcagtcgttcacccagctggtcgccatggcccgccccctgcgccgcgaggacgagcagatcgaggccatccgtaaggacctggagtccctgcgcgaccagatctccaagctggggcgctgagcgatgacgcggccgatgtctcaaagccggttcctcgaccggttccggttcttcgagggggagccccaccaggtctccggtgcctcgatgctgtttgacgccatctcccagggggtgcccgccgagcaggtgctcgacgaggacgccccctgggcccgccgctacagccagcccaacacctcgaaatcggtggatcgggccctgcccctgatccagctgttcgaggggcgcgagctcaaggcctatcccgaccccggcaccaagggcgatccctggacgatcggctggggcagcacccggatgcccgacggccggccggtccgcaagggcgacacggtcaccgcagcgcaggccgaccagatgctgcgcacctgggtcgagcaggacgaggcggccctggccaaggccatccccaactgggccaagctcaccaccgaccagcaggccgccctcctgtcgttcacctacaacgcaggccgggactggtacgggccctccaacggctacgccaccctgtcggccaagctcgccgagggcaagctctcggaggtgccccgggcgatgctcctgtacgtcaaccccggcagcgacgtcgaggaggggctccggaaccgccggatggccgagggcgacctgtggggccggccgccccaggcccagaagcccagactcctcctgacccgcacccggcagatcgacggccggggcctcgagctcctgcgcctccagcggatgcacggcagcgtctccaagggcgatctcctgaccgtcagcggccaggcccggaaccaggtcttccgcaccggggccagcagcaagagcggcagcatggagccgatcccggaggggctctggcgcgtcgagaacatcgcctgggccggcggcaaagacaactataacgccagctggggcgagggcctgggccccgcgtcggtgccgctcacctggcttggccctggcaagaccggacgctcggccatcgaagctcacctggacagtaaccaaaacgtgttccccgggacggccggctgcatcggcttccggtccctggccgatctccagacgttcatcggctggctgcgggcagatgatcctcgggagctcactgtcgattggggcctgggtaccgtgcccaagcgcccctaacgaccccgcccattcgtgaatagaccggcctggttctccgccatcctgctgaccatgctggcggccctgatgacggcgcacatcctcgttatccacgtcgatgtcgccagctgtcagagccacaagcggtacctactcgagcagcgccgcaccggcagcctgccccaggagctccggaacgtgcccgacctggtggaggcggaatgcgccgacctggagggcaagtttcggagcgtcgtggaccagtgggtgtcggtgatcttgagtctgctcggtggcgcgggggtcgccgcggccatgggcaaaccgccgacggatcagccggggcgttgaccccagatgctcaccagggcagccatcaggccgagagacagtacgagcgaggcgaagaccatgggactagcggcgggatcgtaggacatgcgcgagccagagagcggcgaaggtgccgcctccccagtggaacccagccatcgggccccatgccaagcagcttaacaggaacacacacaacaccaggacggaggtggcaggatccttaagcgtgtcacgcaggtgcatccgccgcctccagggggtcgccgtcgttgacggccaggagcagcaggtcctcgacgtcgctggtggtgtgcccgttccactggggggcgttcgagagctcgacagccccggcggccttgaggtgggggatgtaccggacgggcaggtggtaggtgatcgggccattggggagctctagcccggcgaccacctggttcgggtacatctctgggccggccagatggtgcttccggctccaccagggctgggcctggaccggggcccacttgatgagcaggaggaacagggcgtagcgatgggcgtagagctcccggaacgtgtggtgcccgtcgctggtgtcggggcgggtcgtctggagcagggctttgcggggggtggtcatcgggcggtaacgaggagggaggcggtttggatggcgtcggagggcgtgtagcctttgtcctggagatgggcggccacgctcagcgtaagattgagacggtaggcaagctccgggggcagccctggggacggcccgggctcttccggctcgccgggcccgtgtcgcgcccaggcgctgcaggaatggcaggctgccgtcgaggtgctggacgaaataggtggctgcctgcttgggcgagcagcctacggcgcgctcgaggcgcagatcctcccaggcgcattggagggcggtttcgaggcccagcatctgggcggtggtgaaatgggggcagtcaggcatgggaggcggagcggtgggatgagagccggcgacggatgcgccgggcgcagaggagggccgcagcgaggcccggggccgcagcgggccccgggacgcccgggaggtggcctccattgggcggctggggcgctgggccgtccggcaggcccaggggccactccgggggcgccgggggcgcatcggagcccctccaggtggacatggccgtggccgggggcagccagccccggggggcaccgccccaggacgggccggtcatccggaagccgaccggggccccgcgccacgacggcaccgggatgaagccgaccggggccccgcgccaggggcccccggagggggtgccgccgaggggcgggtcgtaggccctgggcggggtctgccagaccgccgggctgtcgggccgctgcccacgccagccggggcgccccgggtcggggatgaagccgtcaggtggggcgtcggcccaggccgcagccggcaccagggccagcaggagcagcaggagcctcatgcggcctcctgtatggcggcgtagatctcccggaggcggtcgccggtctggcggatctgctccggggtgcaggggacgacgtcgaggcggacggccccggtctccgagcagacgtagggcatgtgcggctcgaggcttcgggccgggtcgagggggcgtcgttcactggggcaccccctgggtcgaggtgggctcccagccgccgtgccccagcaccagatccacccggcgatgcccagatcgagcttgcggctggcgaggatctccttcctcttgtgctggccacctcataattaacaaccaatccatttgggaagacaaatcaattttcgggttttcaccttgtaatcccgtttaactccagagtacaccccctttttcaatagcctgaaagtctccaagaaggaatggtacaactttaaattgccaagaattggaaataaaattacaaattgctccgctaagggccttccaagcgagggtagcggtttttccgggttgaccaacccaaccttaacaaaaaacaaataattttaaacccaaatctaaaaaaggacataacgcttccttcgatttcttgacattcatttaaaacccggtaaattcccttttttttataatttccctcgttaaaacccacttccacctttcctttaaaaccaacctcctttttcctca

SEQ ID NO: 2 - protein, 169 aa, Cyanophage S-2L
  misc_feature: New ORF = left: 9 right: 515 frame: 1 size(aa): 169
SEGPGRHGDVQGGRHRMALRPGDLVKVMDPDKGGVRFGGRVVAQDGDTITLDAAPPTPLAGRGQPAPGGTAHGRAGHPEADRGPAPRRHRDEADRGPAPGAPGGGAAEGRVVGPGRGLPDRRAVGPLPTPAGAPRVGDEAVRWGVGPGRSRHQGQQEQQEPHAASCMAA

SEQ ID NO: 3 - protein, 261 aa, Cyanophage S-2L
  misc_feature: New ORF = left: 9 right: 791 frame: -1 size(aa): 261
LSRWPSTRGRRSSPAASSIWASPGWIWCWGTAAGSPPRPRGCPSERRPLDPARRPRAAHALRLLGDRGRPPRRRPLHPGADPPDRRPPPGDLRRHTGGRMRLLLLLLALVPAAAWADAPPDGFIPDPGRPGWRGQRPDSPAVWQTPPRAYDPPLGGTPSGGPWRGAPVGFIPVPSWRGAPVGFRMTGPSVGGAPRGWLPPAGEGCRGCRVERDRVAVLGNHPTAEADPALVRVHDLDKIPRAQGHPMAPTLNVTVSSRTLR

SEQ ID NO: 4 - protein, 111 aa, Cyanophage S-2L
  misc_feature: New ORF = left: 10 right: 342 frame: 2 size(aa): 111
RRVLDDTVTFKVGAIGWPCALGILSRSWTRTRAGSASAVGWLPRTATRSRSTRHPRHPSPAGGSQPRGAPPTDGPVIRKPTGAPRHDGTGMKPTGAPRQGPPEGVPPRGGS

SEQ ID NO: 5 - protein, 82 aa, Cyanophage S-2L
  misc_feature: New ORF = left: 35 right: 280 frame: 3 size(aa): 82
RSRWAPSDGPAPWGSCQGHGPGQGRGPLRRSGGCPGRRHDHARRGTPDTPRRPGAASPGGHRPRTGRSSGSRPGPRATTAPG

SEQ ID NO: 6 - protein, 65 aa, Cyanophage S-2L
  misc_feature: New ORF = left: 41 right: 235 frame: -3 size(aa): 65
PARPWAVPPGAGCPRPARGVGGAASSVIVSPSWATTRPPKRTPPLSGSMTLTRSPGRRAIRWRPP

SEQ ID NO: 7 - protein, 91 aa, Cyanophage S-2L
  misc_feature: New ORF = left: 157 right: 429 frame: -2 size(aa): 91
RLHPRPGAPRLAWAAARQPGGLADPAQGLRPAPRRHPLRGPLARGPGRLHPGAVVARGPGRLPDDRPVRGRCPPGLAAPGRRGVSGVPRRA

SEQ ID NO: 8 - protein, 84 aa, Cyanophage S-2L
  misc_feature: New ORF = left: 239 right: 490 frame: -3 size(aa): 84
GSCCSCWPWCRLRPGPTPHLTASSPTRGAPAGVGSGPTARRSGRPRPGPTTRPSAAPPPGAPGAGPRSASSRCRRGAGPRSASG

SEQ ID NO: 9 - protein, 224 aa, Cyanophage S-2L
  misc_feature: New ORF = left: 346 right: 1017 frame: 2 size(aa): 224
ALGGVCQTAGLSGRCPRQPGRPGSGMKPSGGASAQAAAGTRASRSSRSLMRPPVWRRRSPGGGRRSGGSAPGCRGRRRGGRPRSPSRRRACAARGLRAGSRGRRSLGHPLGRGGLPAAVPQHQIHPGDAQIELAAGEDLLPLVLGHLDSQPGHAMLEDRVDVRGVLVEIPVELQEVPAPFVSEGVDGPPRTGVGSSVRSGRGHGDRTSGRTGPRRQGPVPRPEG

SEQ ID NO: 10 - protein, 158 aa, Cyanophage S-2L
  misc_feature: New ORF = left: 425 right: 898 frame: 3 size(aa): 158
SRQVGRRPRPQPAPGPAGAAGASCGLLYGGVDLPEAVAGLADLLRGAGDDVEADGPGLRADVGHVRLEAFGPGRGGVVHWGTPWVEVGSQPPCPSTRSTPAMPRSSLRLARISFLLCWATSIVSQAMPCWRTESMCGVYSLKSRLSSRRYQPRLSVRA

SEQ ID NO: 11 - protein, 75 aa, Cyanophage S-2L
  misc_feature: New ORF = left: 433 right: 657 frame: -2 size(aa): 75
TTPPRPGPKASSRTCPTSARRPGPSASTSSPAPRSRSARPATASGRSTPPYRRPHEAPAAPAGPGAGCGLGRRPT

SEQ ID NO: 12 - protein, 131 aa, Cyanophage S-2L
  misc_feature: New ORF = left: 494 right: 886 frame: -3 size(aa): 131
QTGLVPPGAQPGFQRVHPAHRLGPPTWHGLADYRGGPAQEEGDPRQPQARSGHRRGGSGAGARRLGAHLDPGGAPVNDAPSTRPEGLEPHMPYVCSETGAVRLDVVPCTPEQIRQTGDRLREIYAAIQEAA

SEQ ID NO: 13 - protein, 59 aa, Cyanophage S-2L
  misc_feature: New ORF = left: 612 right: 788 frame: 1 size(aa): 59
GMCGSRPSGRVEGASFTGAPPGSRWAPSRRAPAPDPPRRCPDRACGWRGSPSSCAGPPR

SEQ ID NO: 14 - protein, 134 aa, Cyanophage S-2L
  misc_feature: New ORF = left: 661 right: 1062 frame: -2 size(aa): 134
SAWCWGSHPAAHSRLPLRPRHRPLTPRPSSSTRPIPMSSPTSNAATDSRPRRTVYALTDKRGWYLLELNRDFNEYTPHIDSVLQHGMAWLTIEVAQHKRKEILASRKLDLGIAGVDLVLGHGGWEPTSTQGVPQ

SEQ ID NO: 15 - protein, 65 aa, Cyanophage S-2L
  misc_feature: New ORF = left: 795 right: 989 frame: -1 size(aa): 65
RRGPVRPLVLSPCPRPLRTLLPTPVLGGPSTPSLTNGAGTSWSSTGISTSTPRTSTRSSNMAWPG

SEQ ID NO: 16 - protein, 80 aa, Cyanophage S-2L
  misc_feature: New ORF = left: 890 right: 1129 frame: -3 size(aa): 80
APLFSQQSSPSLQPSMLLLLRLIRLVLGVPPRRPQPPTPPASAPAPDAEAQFVHSSYPHVLAHFERCYRLPSSEDRLRPH

SEQ ID NO: 17 - protein, 64 aa, Cyanophage S-2L
  misc_feature: New ORF = left: 902 right: 1093 frame: 3 size(aa): 64
TVLRGRESVAAFEVGEDMGIGRVDELGLGVRGRCRGRRGRRLWAAGWDPQHQADQAKEQQHRRL

SEQ ID NO: 18 - protein, 50 aa, Cyanophage S-2L
  misc_feature: New ORF = left: 963 right: 1112 frame: 1 size(aa): 50
DEWTNWASASGAGAEAGGVGGCGRRGGTPSTKRIRRRSSNIDGCKDGEDC

SEQ ID NO: 19 - protein, 104 aa, Cyanophage S-2L
  misc_feature: New ORF = left: 993 right: 1304 frame: -1 size(aa): 104
LQAPDRGCGQAMGLLPPPPGQAPDLEAPQRRHRRHPGLVCQLARGPQRRIPHAQSRLMSSPILSAVLAVLTAVYVAAPSPDPLGAGGPTPPPTAAYPSGLGTGP

SEQ ID NO: 20 - protein, 56 aa, Cyanophage S-2L
  misc_feature: New ORF = left: 1066 right: 1233 frame: -2 size(aa): 56
SGSTPTAPPSSPRPRLPTGTWSPTPNPACAEPPHELPYSLSSPRRPYSRLCCCSFA

SEQ ID NO: 21 - protein, 196 aa, Cyanophage S-2L
  misc_feature: New ORF = left: 1133 right: 1720 frame: -3 size(aa): 196
SHVRTDPPRRRRRLRDLRWLRPGDPRQRPPLAHGRLPGAGRRREPPAVPRRPRPGGATASRGHPARPGGAHPLPPLTPCPDSASSTRSPGCLSAPRSSTIRPAAWSAARDASAPSSAACASGWRSPQPKPGRTCPVSGSYRRQIEAAAKRWGFYLHRQGKHLIWKHPNGATVVTPASSANWHVVPNAESRMRRAAS

SEQ ID NO: 22 - protein, 89 aa, Cyanophage S-2L
  misc_feature: New ORF = left: 1136 right: 1402 frame: 3 size(aa): 89
GGSAHAGFGVGDHVPVGRRGRGDDGGAVGVLPDQVLALAVEVEAPSLGRSLDLAPVATGHGTGPPGLRLGAPPARRACRRRGRRGVPRS

SEQ ID NO: 23 - protein, 73 aa, Cyanophage S-2L
  misc_feature: New ORF = left: 1204 right: 1422 frame: 2 size(aa): 73
RRWRRWGASRSGACPGGGGRSPIAWPQPRSGACSYRTRDRSSRASAGGSSSQTRMPPTRAQRRPSQLTTRPAG

SEQ ID NO: 24 - protein, 85 aa, Cyanophage S-2L
  misc_feature: New ORF = left: 1237 right: 1491 frame: -2 size(aa): 85
HHAQTPHPAPAPRDASQPPGPQLSGRPRGQLRGTPLRPRRRHARLAGGAPSRSPGGPVPCPVATGARSRLRPSDGASTSTARAST

SEQ ID NO: 25 - protein, 112 aa, Cyanophage S-2L
  misc_feature: New ORF = left: 1305 right: 1640 frame: 1 size(aa): 112
LPDTGQVLPGFGWGLLQPDAHAADEGAEASLAADHAAGRIVEDLGAERHPGERVLDAESGHGVRGGRGWAPPGRAGWPLEAVAPPGRGRRGTAGGSRRRPAPGRRPWASGGR

SEQ ID NO: 26 - protein, 177 aa, Cyanophage S-2L
  misc_feature: New ORF = left: 1308 right: 1838 frame: -1 size(aa): 177
RAGRLHRLPAPAVPGDGQPRLHPQGHLRHPAPDLSRLPLIPCPNRPATSATASTRPSMATAWRSASTTTARPWSPTWSRASSRTSSGSSTTTPRWSDSFKRPPGSTWWSPPPPPSDTMPRLRIQHPLPGMPLSPQVLNYPAGRVVSCEGRLCALVGGMRVWLEEPPAEAREDLSRVR

SEQ ID NO: 27 - protein, 120 aa, Cyanophage S-2L
  misc_feature: New ORF = left: 1426 right: 1785 frame: 2 size(aa): 120
LRTWGLRGIPGSGCWMRSLGMVSEGGGGGLHQVEPGGLLKLSLHLGVVVEEPLEVRDDARLQVGDHGRAVVVDADLQAVAIEGRVDAVADVAGLFGHGINGKRERSGAGCRRCPWGWSRG

SEQ ID NO: 28 - protein, 82 aa, Cyanophage S-2L
  misc_feature: New ORF = left: 1495 right: 1740 frame: -2 size(aa): 82
SLSLAVDPMSEQTRHVGDGVYATFDGYGLEIRVNDHRSPMVAYLEPGVVANLQRFLDDHAQVERQLQEATRLDLVEPTPSPL

SEQ ID NO: 29 - protein, 57 aa, Cyanophage S-2L
  misc_feature: New ORF = left: 1644 right: 1814 frame: 1 size(aa): 57
RGSPGRSHRRSRRRRRRRGGSVRTWDQRQAREIRRWVSEMSLGVESGLTISRNSRCR

SEQ ID NO: 30 - protein, 146 aa, Cyanophage S-2L
  misc_feature: New ORF = left: 1682 right: 2119 frame: 3 size(aa): 146
TPSPTWRVCSDMGSTASERDQALGVGDVLGGGVGVDHLQEQQVPVGGAGALPVTTGTAADAILECAQLGVEAKHARAGLERGRLRCGGGEDDEATAEGGKEGVEGSHGRGWRWTPGKGPLGAPEGFGRGRGGSAQAEGQLAGLGQG

SEQ ID NO: 31 - protein, 118 aa, Cyanophage S-2L
  misc_feature: New ORF = left: 1724 right: 2077 frame: -3 size(aa): 118
PPPATAEPLRGPQGPLSRCPPPPPPMRPLYAFLSTFCGGLVVFAATTAQASPLEPSTGVFRLYAQLGALEYGVRSRARGDGQGACTAYRHLLFLEMVNPDSTPKDISDTQRLISLACR

SEQ ID NO: 32 - protein, 85 aa, Cyanophage S-2L
  misc_feature: New ORF = left: 1744 right: 1998 frame: -2 size(aa): 85
DPSTPSFPPSAVASSSSPPPQRRRPRSSPARACFASTPSWAHSSMASAAVPVVTGRAPAPPTGTCCSWRWSTPTPPPRTSPTPSA

SEQ ID NO: 33 - protein, 100 aa, Cyanophage S-2L
  misc_feature: New ORF = left: 1789 right: 2088 frame: 2 size(aa): 100
PSPGTAGAGRRCRRPARHHGHGCGRHTRVRPAGRRGETRPCWARAGTPALWWRRRRRGHRRRWKGRRRGVSWEGVEVDTWKGAPGGPGGVRPWPGGVSPG

SEQ ID NO: 34 - protein, 385 aa, Cyanophage S-2L
  misc_feature: New ORF = left: 1842 right: 2996 frame: -1 size(aa): 385
PAGGGARHQARLPRPRRGRRRRGLIAPCYSGDTGSGRPPPYSNRPWPSCPAIRTTPSERAPPGPPPPPASWSRCPPSRTCCSRRTTPPPASGNGSSRCCRWSPPWRPRCSRRCRRPPFARCPPGWTTRSSRPGNWCAGLRSWLTRSVCDILRGDCSRALIVERRGNCPSTAPPPNGHHLYRHPPRRHHRHPQVGRAHLHPLRRPPVQRRHLVRPQLGRPPRPGHRSRCEDRGPGDRGDRRPHDSGPQGPDQGPDPGCPPGRRLLHVRLGPHGPLHHRPPRRRHRQRCRLPVSNPGRGPQAGPQPGLTPPGHGRTPPGPPGAPFQVSTSTPSHETPLRLPFHLLRWPRRLRRHHSAGVPARAQHGRVSPLRPAGRTRVWRPQPCPW

SEQ ID NO: 35 - protein, 61 aa, Cyanophage S-2L
  misc_feature: New ORF = left: 1992 right: 2174 frame: 1 size(aa): 61
RGLMGGGGGGHLERGPWGPRRGSAVAGGGQPRLRASLRASARVRDWQSASLAMSPPGRTMV

SEQ ID NO: 36 - protein, 145 aa, Cyanophage S-2L
  misc_feature: New ORF = left: 2081 right: 2515 frame: -3 size(aa): 145
WNGGGTAPPPLLPPMATTFTATLPDGTTATRKSAERTYTHCVARQSSDGTWFAHSWAGRPGLAIAAAAKIGGRAIEATVAHTTAAPKALTKAQIQDALRAAGYYMSGWVRMGRYTIVRPGGDIANDADCQSLTLAEARKLALSLG

SEQ ID NO: 37 - protein, 122 aa, Cyanophage S-2L
  misc_feature: New ORF = left: 2092 right: 2457 frame: 2 size(aa): 122
GPACGPRPGLETGSRHRWRCRRRGGRWCSGPCGPNRTCSSRRPGGHPGSGPWSGPWGPLSCGRRSPRSPGPRSSQRLRWPGRGGRPSCGRTRCRRWTGGRRSGCRCARPTCGWRWCRRGGWR

SEQ ID NO: 38 - protein, 372 aa, Cyanophage S-2L
  misc_feature: New ORF = left: 2123 right: 3238 frame: 3 size(aa): 372
RLAVGIVGDVAAGADDGVAAHADPTGHVVAGGPEGILDLGLGQGLGGRCRVGDGRLDRPAPDLRSGCDGQAGAAGPAVGEPGAVAGLAGDAVGVGALGRLAGGGGAVGEGGGKGGGHWGEERWRGSSPSVPLLKHGSNPRAICHRRIESARISSRRTSSRACSIWWSSRADIGQTGAADIFSSTGAAMGGSIDSTGSSRSQRREVELCVCCSRSSRADICSRTPGVGADLGALSRMASYGSRGMRAMGGWNRVGAGLSRYPHYSTGQSALVVVALVGVGAAELGGELLHQLVKGAVLDVVDLGVDQRRQGAPDVGVGLAGLAVVVQIGGELVGPVGGGQLVYGVPSLGDQLEGGGFVHGGGAVGALRPPYTY

SEQ ID NO: 39 - protein, 64 aa, Cyanophage S-2L
  misc_feature: New ORF = left: 2211 right: 2402 frame: 1 size(aa): 64
PAARRASWIWALVRALGAAVVWATVASIARPPIFAAAAMARPGRPAQLWANQVPSLDWRATQWV

SEQ ID NO: 40 - protein, 100 aa, Cyanophage S-2L
  misc_feature: New ORF = left: 2251 right: 2550 frame: -2 size(aa): 100
HIARGLLPCFNSGTEGELPLHRSSPQWPPPLPPPSPTAPPPPASRPSAPTPTASPASPATAPGSPTAGPAAPAWPSQPLRRSGAGRSRRPSPTRQRPPRP

SEQ ID NO: 41 - protein, 138 aa, Cyanophage S-2L
  misc_feature: New ORF = left: 2461 right: 2874 frame: 2 size(aa): 138
RWWPLGGGAVEGQFPLRSTIKAREQSPRNMSQTDRVSQDLKPAHQFPGLLDLVVQPGGHRANGGRRHLLEHRGRHGGLHRQHRLEPFPEAGGGVVRLLQQVLEGGHLLQDAGGGGGPGGALSDGVVRIAGHEGHGRLE

SEQ ID NO: 42 - protein, 110 aa, Cyanophage S-2L
  misc_feature: New ORF = left: 2523 right: 2852 frame: 1 size(aa): 110
STGAIPAQYVTDGSSQPGSQAGAPVPGPARSGGPAGRTSGKRGPPTSSRAPGPPWGAPSTAPARAVPRGGRWSCASAAAGPRGRTSAPGRRGWGRTWGRSLGWRRTDRGA

SEQ ID NO: 43 - protein, 118 aa, Cyanophage S-2L
  misc_feature: New ORF = left: 2554 right: 2907 frame: -2 size(aa): 118
WGYRLRPAPTLFQPPMALMPRDPYDAIRESAPRSAPTPGVLEQMSALEDLLQQTHNSTSRLWERLEPVLSMEPPMAAPVLEKMSAAPVCPMSARLDHQIEQARELVRRLEILADSIRL

SEQ ID NO: 44 - protein, 114 aa, Cyanophage S-2L
  misc_feature: New ORF = left: 2582 right: 2923 frame: -3 size(aa): 114
LPRAIVGIPAQAGPHPIPTAHGPHAPRSVRRHPRERPQVRPHPRRPGADVRPRGPAAADAQLHLPPLGTARAGAVDGAPHGGPGAREDVGGPRLPDVRPAGPPDRAGPGTGAPA

SEQ ID NO: 45 - protein, 77 aa, Cyanophage S-2L
  misc_feature: New ORF = left: 2895 right: 3125 frame: 1 size(aa): 77
AGIPTIARGNQPSSSSPSSGSGQPSLVASSSTSWLKAQYSMSLISAWISGARVPQTLAWAWPGSQWSYRSAGSSSAL

SEQ ID NO: 46 - protein, 109 aa, Cyanophage S-2L
  misc_feature: New ORF = left: 2927 right: 3253 frame: -3 size(aa): 109
IRRALIGIRGPKRPHRSPTMDKATALQLISQAWDSINQLTAAYRADELPADLYDHCEPGQAHANVWGTLAPLIHAEINDIEYCAFNQLVEELATKLGCPDPDEGDDDEG

SEQ ID NO: 47 - protein, 90 aa, Cyanophage S-2L
  misc_feature: New ORF = left: 2927 right: 3253 frame: -3 size(aa): 109
GIARLNPPCFNRYTGAEAPPPLPHHGQSHRPPADLPGLGLHKPADRRLQGRRAPRRSVRPLRARPGPRQRLGHPGAADPRRDQRHRVLRL

SEQ ID NO: 48 - protein, 115 aa, Cyanophage S-2L
  misc_feature: New ORF = left: 3025 right: 3369 frame: 2 size(aa): 115
SRRGSAAPGCPRRWRGPGRARSGRTDRRGARRPCRRRSAGLWSPKPGRSAGGRWLCPWWGSGGGASAPVYLLKHGGFSRAIPQRRSGFVVVHPWARYRRQSARASATPTVWVSWA

SEQ ID NO: 49 - protein, 146 aa, Cyanophage S-2L
  misc_feature: New ORF = left: 3129 right: 3566 frame: 1 size(aa): 146
AAVSWFMESQAWEISWRAVALSMVGERWGRFGPRIPIKARRIQPRNTSAEIGVRSGPPLGAVSAPVGSGLRHPDGVGVVGIAGPGAYPDGLAVTQGHVAPGDTVQTREQGSWQVELVNRLGSRHRGGSSGVGRGGGRGAPGWLRPG

SEQ ID NO: 50 - protein, 55 aa, Cyanophage S-2L
  misc_feature: New ORF = left: 3241 right: 3405 frame: -2 size(aa): 55
RPGRPDKHLVRLCPRHPHRRGGGGPSRLAPIPRPGVDHYEPRSPLRYCAAESAVL

SEQ ID NO: 51 - protein, 104 aa, Cyanophage S-2L
  misc_feature: New ORF = left: 3273 right: 3584 frame: -1 size(aa): 104
SSTSRSTWPEPPGGPTAPTPSHPTAPPTMSRSQPIHKLYLPGPLLSGLHRVSRSYMPLGDGQAVRISTWSGYAHDTHTVGVAEARADWRRYRAQGWTTTNPDLR

SEQ ID NO: 52 - protein, 106 aa, Cyanophage S-2L
  misc_feature: New ORF = left: 3293 right: 3610 frame: 3 size(aa): 106
WSTPGRGIGASRLGPPPPRRCGCRGHSRTRCLSGRPGRHPGACSSGRHGADQRAGVLAGRACESAGISTSWGEQWGGTGWGPWGPRVAQARLTLTCSISCATWLCL

SEQ ID NO: 53 - protein, 124 aa, Cyanophage S-2L
  misc_feature: New ORF = left: 3389 right: 3760 frame: -3 size(aa): 124
GNRRPAHPRGRPRAAHHRGQHRRHPRRRPGGAQLLGVGPVQADRLLGHPLQAQPGGAADRARQGQPGLSHPGAPRPPPRPTPLLPPRCRDPSRFTSSTCQDPCSLVCTVSPGATCPWVTARPSG

SEQ ID NO: 54 - protein, 101 aa, Cyanophage S-2L
  misc_feature: New ORF = left: 3481 right: 3783 frame: 2 size(aa): 101
IGWDLDIVGGAVGWDGVGAVGPPGGSGQVDLDVLDQLRHLAVLVEGAPVGDPLVLVLHQVAEPLLAGVLDDDGVALDGALLEVGLEDAQVVDYLSPPGAKG

SEQ ID NO: 55 - protein, 56 aa, Cyanophage S-2L
  misc_feature: New ORF = left: 3588 right: 3755 frame: -1 size(aa): 56
STTCASSRPTSSSAPSRATPSSSKTPARRGSATWCRTSTSGSPTGAPSTSTARWRS

SEQ ID NO: 56 - protein, 76 aa, Cyanophage S-2L
  misc_feature: New ORF = left: 3652 right: 3879 frame: -2 size(aa): 76
IPRVLIVVRGPRRPHRFQTMDTIHTQFAEAGLTLGPWRAEVIDDLRILEADLEQRTIEGNTVVIQDAGQEGLSYLV

SEQ ID NO: 57 - protein, 101 aa, Cyanophage S-2L
  misc_feature: New ORF = left: 3662 right: 3964 frame: 3 size(aa): 101
LSPSWPASWMTTVLPSMVRCSRSASRMRRSSITSARQGPRVRPASANWVWMVSMVWKRWGRLGPRTTIKTRGIQLRNTPGLVSPPGRRRPPGSRRRRRSSR

SEQ ID NO: 58 - protein, 250 aa, Cyanophage S-2L
  misc_feature: New ORF = left: 3693 right: 4442 frame: 1 size(aa): 250
RRCCPRWCAARGRPRGCAGRRLPQPARGQGLGRLRRTGCGWCPWFGSGGGASAPVQLLKHGGFSCAIPRGWSARQVGEGLPDLGVVDDLLGEGAQVVLLAEGHGLLDLVYGARDRVVAGRAEGPLDLGATAGEDLGLDLAGDGGEGGAVHGVLCGVYLLKHGGLRGAIRLGPGQDLGPVAHEHHPLLAPLGLVEGGAVGHTVGDPDVVDRGPAAALAPAMLTIEVHLSGAVGAPVLAALGDGHPGGLEGA

SEQ ID NO: 59 - protein, 249 aa, Cyanophage S-2L
  misc_feature: New ORF = left: 3764 right: 4510 frame: -3 size(aa): 249
APPGPGRGPSLVPPHPDTPWPSYAPSRPPGWPSPSAASTGAPTAPLRCTSIVSMAGARAAAGPRSTTSGSPTVCPTAPPSTSPSGARSGWCSWATGPRSWPGPRRIAPRNPPCFNRYTPHRTPWTAPPSPPSPARSRPRSSPAVAPRSSGPSARPATTRSLAPYTRSRRPWPSARSTTWAPSPRRSSTTPRSGRPSPTWRADQPRGIAQLNPPCFNSCTGAEAPPPLPNHGHHPHPVRRSRPNPWPLAG

SEQ ID NO: 60 - protein, 222 aa, Cyanophage S-2L
  misc_feature: New ORF = left: 3883 right: 4548 frame: -2 size(aa): 222
PTPARPRWRPAAEPLRAPGGAPHSSHPTPTPHGQVTHPPGRPDGHLPVPQAPGRQRPRSGALRSSAWPAPGQQPGPDLPRPGRRRYALRHPPRPAPVGRGAGGVRGQPGRDPGLGRGVLRLVIRRALIGIHRTGPHGPRHPPRHRPPDRGPDPRRLWRPDRVDLPLDLPLHDLWPHIPGPGGRGLLPGAQPGHPHREDRLRRRDPGGLRLPGGLTSPGVLRS

SEQ ID NO: 61 - protein, 85 aa, Cyanophage S-2L
  misc_feature: New ORF = left: 3909 right: 4163 frame: -1 size(aa): 85
VYTAQDPMDRATLPAIARQIEAQILAGCGAQIEWTFRSTCHYTISGPIYQVQEAVAFCQEHNLGTLTEKIVYDAEIREAFAYLAG

SEQ ID NO: 62 - protein, 171 aa, Cyanophage S-2L
  misc_feature: New ORF = left: 3968 right: 4480 frame: 3 size(aa): 171
GCPGCAPGRRPRPPGPGIWGQRSCSGRSSGRSTRSGRHSRRGSGPRSGGRWRGGWRGPWGPVRCIPIKARRITRRNTPRPRPGSRPGCPRTPPAPRPTGAGRGGCRRAYRRRPGRGRSGPGCCPGAGHADDRSAPERGRWRPGACGTGRWPSGRPGGCVTWPWGVGVGWDE

SEQ ID NO: 63 - protein, 170 aa, Cyanophage S-2L
  misc_feature: New ORF = left: 4185 right: 4694 frame: -1 size(aa): 170
AAGRGPWCHARHRPAHPPHRGAPPDQPQEGRPPGHHRGHPQVAPGAGADRRRQGPDGGRPLSPSGPREGPLTRPTPPRHPMAKLRTLQAARMAISQCRKHRGANGPAQVHFDRQHGRRQGSSRAPIYHVRVADGMPYGTPLDQPQWGEERVVFVGNRAEILAWAEAYCAS

SEQ ID NO: 64 - protein, 79 aa, Cyanophage S-2L
  misc_feature: New ORF = left: 4375 right: 4611 frame: 2 size(aa): 79
AGPLAPRCLRHWEMAIRAAWRVRNLAMGCRGGVGRVRGPSRGPEGLSGRPPSGPCRRRSAPAPGATCGCPRWWPGGRPS

SEQ ID NO: 65 - protein, 90 aa, Cyanophage S-2L
  misc_feature: New ORF = left: 4446 right: 4715 frame: 1 size(aa): 90
LGHGVSGWGGTSEGPLPGPGGAQRPAAIWALPASVSTSTRCDLRVPSMVARRPAFLRLVRRGASVRGMCRTVPSMAPRPSPCCSITRPTL

SEQ ID NO: 66 - protein, 442 aa, Cyanophage S-2L
  misc_feature: New ORF = left: 4484 right: 5809 frame: 3 size(aa): 442
GAPPGARRGSAAGRHLGLAGVGQHQHPVRLAGALDGGQEAGLLEVGQAGRLGEGDVQDGAEHGTTALALLLNHQADPVEQRLGGVVEGVPGEAGPLGLAGLRGVEAGLGGSGAAAGGGVHPVVGGGLGDGLGGPLLGGGGGHALGDGGLLGDGLGDDGLGLGQADPLAVAVEVAAGGAGYAAVLDVLLAVFGGQNGFVEGGGGGEEVRHRRGGGGVGLVPPDCWGLVGAWVAPGAPGLLGAGRGWTAAPGRRVGGAIGGLSLPPCITIKARRLCLRNPLHSHFTDCHTSGLATAAELVPVGVGLVLVPPLGDGVPPAHALGGLAGIPSRPPELVVGHRPGLGLPAGEVGSGGMVGAGHGRGGGGGEGGWARGAPGGGSGRQQVVPADRGQDVPLGNLDEGLVAELGIPDPELGRGGVGAPVAGGAGQPHQELDRARPGQVPV

SEQ ID NO: 67 - protein, 367 aa, Cyanophage S-2L
  misc_feature: New ORF = left: 4514 right: 5614 frame: -3 size(aa): 367
AAPRRPPGPSPLPPTATPTMSCAHHATAADFARWEAKARSMTDYELWWSARDARQAAERMRGWNPVAEGRYEDEAHTYGDELRRRRQARSVTVCEVAMQGIAQAQPPCFNSYTRGERQPPDGATHAPTRGSSPAPTRPQQSGGTRRHPRADQPPAVRGHQPHPTATPPMSDFFPTPTTLDEAVLAAEYSQQNVEYCGITCTPSGYFYCHGKRIGLAKAEAIVAQAVAEEAAVAEGMTAATAEQRATQTISEAAADHRVDPAAGCRTAAPQTGLDTPEPRQPKRTGFTWDALNDATKALFYRVGLVIEQQGEGRGAMLGTVLHIPLTEAPRLTNLKKAGLLATIEGTRKSHRVLVLTDAGKAQMAAGR

SEQ ID NO: 68 - protein, 135 aa, Cyanophage S-2L
  misc_feature: New ORF = left: 4698 right: 5102 frame: -1 size(aa): 135
LLPHPHHPRRSRSGRRIQPAERRVLRHNLHPQRLLLLPRQADRPGQGRGHRRPGRRRGGRRRRGHDRRHRRAAGHPDHLRGRRRPPGGPRRRLPHRCPPDRPRHPGAPPAQADRLHLGRPQRRHQGAVLQGRPGD

SEQ ID NO: 69 - protein, 68 aa, Cyanophage S-2L
  misc_feature: New ORF = left: 4702 right: 4905 frame: -2 size(aa): 68
PPPPPSSGPPRPSPRPPPTTGWTPPPAAAPLPPRPASTPRSPASPSGPASPGTPSTTPPRRCSTGSAW

SEQ ID NO: 70 - protein, 92 aa, Cyanophage S-2L
  misc_feature: New ORF = left: 4719 right: 4994 frame: 1 size(aa): 92
NSALVASLRASQVKPVRLGWRGSGVSRPVWGAAVRQPAAGSTRWSAAASEMVWVARCSAVAAVMPSATAASSATAWATMASALARPIRLPWQ

SEQ ID NO: 71 - protein, 176 aa, Cyanophage S-2L
  misc_feature: New ORF = left: 4759 right: 5286 frame: 2 size(aa): 176
SRSAWAGGAPGCRGRSGGQRCGSRRRGPPGGRRRPRRWSGWPAARRWRRSCPRRRRPPRRRPGRRWPRPWPGRSACRGSRSSRWGCRLCRSTRRSAGCIRRPERLRRGWWGWGRSQTSEGWRWGGVGAPGLLGAGRRVGGAWCPRTAGGGSGLDCCPWSARGWRHRGVVSPPLYNY

SEQ ID NO: 72 - protein, 92 aa, Cyanophage S-2L
  misc_feature: New ORF = left: 5004 right: 5279 frame: 1 size(aa): 92
PLGVQVMPQYSTFCWLYSAARTASSRVVGVGKKSDIGGVAVGWGWCPRTAGGWSARGWRLVPPDCWGRVGAGLLPLVGAWVAPSGGCLSPLV

SEQ ID NO: 73 - protein, 106 aa, Cyanophage S-2L
  misc_feature: New ORF = left: 5023 right: 5340 frame: -2 size(aa): 106
QSVKWLCRGLRRHSRRALIVIQGGRDNPPMAPPTRRPGAAVQPRPAPSSPGAPGATHAPTSPQQSGGTNPTPPPPLRCLTSSPPPPPSTKPFWPPNTASRTSSTAA

SEQ ID NO: 74 - protein, 59 aa, Cyanophage S-2L
  misc_feature: New ORF = left: 5106 right: 5282 frame: -1 size(aa): 59
LYKGGETTPRWRHPRADQGQQSSPDPPPAVRGHQAPPTRRPAPSSPGAPTPPHRHPSDV

SEQ ID NO: 75 - protein, 174 aa, Cyanophage S-2L
  misc_feature: New ORF = left: 5326 right: 5847 frame: 2 size(aa): 174
PLHRLSHFGPGDGGGARPRRCGPRPRTAPRRRGSTRACARRPGGHPEPTTRARSRSSTGPWPPSGRSRQRWHGGRRTWSGWRWGGGGMGPGGAGGRLRPAAGRPGRSGSGRPAWQPRRGSRGRAWHSRPGTWPRWCGRPSSRGCGTATPGARPSSTRSGPGLEPAPRGWPWAGR

SEQ ID NO: 76 - protein, 186 aa, Cyanophage S-2L
  misc_feature: New ORF = left: 5334 right: 5891 frame: -1 size(aa): 186
SAGRSRQPGGGLYRQRPAHGHPRGAGSKPGPDLVELGRAPGVAVPHPRLLGRPHHLGQVPGLECQARPRDPRRGCQAGRPDPDLPGRPAAGLSRPPAPPGPIPPPPHRHPDHVLRPPCHRCRLRPLGGQGPVDDRLRALVVGSGCPPGRRAHARVEPRRRGAVRGRGPHLRGRAPPPSPGPKCDSL

SEQ ID NO: 77 - protein, 86 aa, Cyanophage S-2L
  misc_feature: New ORF = left: 5487 right: 5744 frame: 1 size(aa): 86
SVIDRALASQRAKSAAVAWWAQDMVGVAVGGRGDGPGGRRGAAQAGSRSSRQIGVRTSRLATSTRVSWPSLAFQTRNLAEVVWAPQ

SEQ ID NO: 78 - protein, 52 aa, Cyanophage S-2L
  misc_feature: New ORF = left: 5494 right: 5649 frame: -2 size(aa): 52
PRSAGTTCCRPEPPPGAPRAHPPSPPPPPRPCPAPTMPPLPTSPAGRPRPGR

SEQ ID NO: 79 - protein, 153 aa, Cyanophage S-2L
  misc_feature: New ORF = left: 5618 right: 6076 frame: -3 size(aa): 153
PTRAGPSGPPTPGPTWADSPGGFGPHPDPGRIASGVFPCFNSGTGAECPTRRPRGRSSRESDQLDEVGNRVAGFTVNGQPMATHEVRALNRDLTWSSSVELLVWLSRTPGYWGAHTTSAKFRVWNAKLGHETLVEVAKRDVLTPICRDDLLPA

SEQ ID NO: 80 - protein, 218 aa, Cyanophage S-2L
  misc_feature: New ORF = left: 5812 right: 6465 frame: -2 size(aa): 218
HPRWWLRCEGSPKRPIQHRRHPLHRGGRPRPHPVQTRSPHDRSHRQADQRAQAHRVLLRCPESGDQGPVLPPLRGDPDRHPGPRHDCRRPPGHRRQGAPDRRPPPDQPQEGGPPGDRRGREEVPQDAPPDRRGPGHLGRPHRGRPGLIHPGASAPIPTPGVLRPGFFRALIVEQGRNAPLDGPGAAPLVNLISWTKSATGWRALPSTASPWPPTRCGL

SEQ ID NO: 81 - protein, 69 aa, Cyanophage S-2L
  misc_feature: New ORF = left: 5813 right: 6019 frame: 3 size(aa): 69
SPHLVGGHGLAVDGKARHPVADFVQLIRFTRGAAPGPSSGAFRPCSTIKARKNPGRNTPGVGMGAEAPG

SEQ ID NO: 82 - protein, 353 aa, Cyanophage S-2L
  misc_feature: New ORF = left: 5892 right: 6950 frame: 1 size(aa): 353
SDSREERPLGRRVGHSAPVPLLKHGKTPDAIRPGSGWGPKPPGESAQVGPGVGGPDGPALVGQAEHLVGLLLALDGLQEARLLEVGQAGGVGQGHLDVGAQAGGGSHAVVPGGGLDLLAEAEEQVLGRLIQGIEGEPGALGLFGLLGGGFGHGGFEFGLDVGEGGLLGATGAVDAESAAWVNLHTVTTSGGVIALGDGGPTLDEIGGLNGHGWRGGGDRVCLRSTSKARGLCPRNSPNRRFTGCNKRPAPGGGPAAAAGRRRRPSRRPPAAAAPARAPGPPPHKAGGTGRGRSQAGAGRRPQTRYHPPACSAWRRSTTPPSRAWPPRRARGPGAQAGALQDLLRVPPSPSASV

SEQ ID NO: 83 - protein, 106 aa, Cyanophage S-2L
  misc_feature: New ORF = left: 5959 right: 6276 frame: 2 size(aa): 106
STEKPRTQYARGRDGGRSPRVNQPRSAPVWAAQMARPSSVRRSILWDFFSPSTVSRRPAFLRLVRRGASVRGTLTSVPRRAAAVMPWSRVAVWISSQRRKNRSLVA

SEQ ID NO: 84 - protein, 185 aa, Cyanophage S-2L
  misc_feature: New ORF = left: 6027 right: 6581 frame: -1 size(aa): 185
PPCFTSGTETDTISTASPPMTVQPADLIKRWTTVAQRDNTPAGGYGVKVHPSGRFSIDGTRCTEEAALAHIQSKLEAPMTEATAKQTKEPKRTGFSFDALNQATKDLFFRLCEEIQTATRDHGMTAAARLGTDVKVPLTDAPRLTNLKKAGLLETVEGEKKSHKMLRLTDEGRAIWAAHTGADLG

SEQ ID NO: 85 - protein, 78 aa, Cyanophage S-2L
  misc_feature: New ORF = left: 6182 right: 6415 frame: 3 size(aa): 78
RRCPGGRRQSCRGPGWRSGSPRRGGRTGPWSPDSGHRRRTRCAWALWSAWRWLRSWGLRVWTGCGRGRPPRCNGCRRC

SEQ ID NO: 86 - protein, 51 aa, Cyanophage S-2L
  misc_feature: New ORF = left: 6280 right: 6432 frame: 2 size(aa): 51
FRASKENPVRLGSLVCLAVASVMGASSLDWMWARAASSVQRVPSMLNRPLG

SEQ ID NO: 87 - protein, 147 aa, Cyanophage S-2L
  misc_feature: New ORF = left: 6517 right: 6957 frame: 2 size(aa): 147
TVMGGEAVEIVSVSVPLVKHGGYALAIPRIDGSQAVTNALLPEAGPQPLQVGGGDLLAVLQPLQHRLELRARRLTKPAVQVGVGLRRGRGGGLKLATILQLVPHGAGRQHHRAEPGPHDELVVPAPRPARSRICSGCRPRHRPLCSR

SEQ ID NO: 88 - protein, 71 aa, Cyanophage S-2L
  misc_feature: New ORF = left: 6524 right: 6736 frame: -3 size(aa): 71
GGGPGARAGAAAAGGRREGRRRRPAAAAGPPPGAGRLLQPVNRLFGELRGHSPRALLVERRQTRSPPPRHP

SEQ ID NO: 89 - protein, 126 aa, Cyanophage S-2L
  misc_feature: New ORF = left: 6585 right: 6962 frame: -1 size(aa): 126
SYRLHRGRWRGRHPEQILERAGLGAGTTSSSWGPGSARWCCRPAPCGTSWRMVASLRPPPRPRLRPTPTCTAGFVRRRARSSSRCCSGWRTARRSPPPTCSGCGPASGSRAFVTACEPSIRGIARA

SEQ ID NO: 90 - protein, 122 aa, Cyanophage S-2L
  misc_feature: New ORF = left: 6616 right: 6981 frame: -2 size(aa): 122
HLRPKIILPTTQRPMARAAPGADPGARRPGRRDHELVVGARLCSVVLSTGAMRNKLEDGSEFEAAAPPPPETDPDLYRRLCEAAGPELEPVLQRLEDGEKVAAADLQRLRARLREQGVCYSL

SEQ ID NO: 91 - protein, 248 aa, Cyanophage S-2L
  misc_feature: New ORF = left: 6626 right: 7369 frame: 3 size(aa): 248
QTPCSRRRARSRCRSAAATFSPSSSRCSTGSSSGPAASQSRRYRSGSVSGGGGAAASNSLPSSSLFRMAPVDNTTEQSLAPTTSSWSRRPGRRAPGSAPGAALAIGLCVVGKIILGRKCHTDAAVDKVNHTGDRFKDKTHPVRAFIVTEAADVELGGTLQADDPLLEQVGVRQGGAVESPGVVPGDRCDQAQVAEDEPVPSPSAGPDDGRGHRLRVSQPGLDPAPQEDFLPASEEGVLPSDVEEGQVV

SEQ ID NO: 92 - protein, 203 aa, Cyanophage S-2L
  misc_feature: New ORF = left: 6806 right: 7414 frame: -3 size(aa): 203
RCAMVAQPPRPTLVSDDLPFLDIAGKYPLLTRREEILLGRRIQAWLTHPEPVPPAIVRSGRRARDRFVLCNLRLVASIARYYTRRLDGTSLTYADLLQEGVIGLQRSAELYIRSFCNNKCTHRMCFILESITRVIYLIHGSIGMTLTAQNNLTDYTEADGEGGTRSRSWSAPAWAPGPRARRGGQALLGGVVDRRHAEQAGGW

SEQ ID NO: 93 - protein, 392 aa, Cyanophage S-2L
  misc_feature: New ORF = left: 7068 right: 8243 frame: -1 size(aa): 392
TASCGQDQRCALDVVSFHVFRSSTPSIAHRYIGRTPPRERTWSRSPWRKATCWTTPTSCPSSRIRHSWDQAAPGGASPRGPACSRYRWLPQASKSWTVTGREKNADIDWATAPMSASTTTFIAPSAWPPWPPLPGPLRPRPGDGATWPPRIRIRAGASRRASPGTRGAPGAPPWPGSQSSPASASSRSACSATVAYPAMSCQVSCCSGRPEIRRLILVAIWSRASASTGLSTWNRSVLRMAPLIRWARAHCSRAGPYWVPLWLRVRSRAFGIVGGIALCYGSTASTPHPGVRRPALPRHRWEVPPPHSPGGNPPGAPDPSLADSPGAGAPGHRPVRQTGSGPVRPLQPAPGRIDRPVLHPATRRHLPDVRRPAPGGGHRPAAFRRALHPQLL

SEQ ID NO: 94 - protein, 70 aa, Cyanophage S-2L
  misc_feature: New ORF = left: 7114 right: 7323 frame: 2 size(aa): 70
PPPGAGRRTSGRCRRVAGCSTGRSMRPGAGCRGRTGPEPVCRTGRWPGAPAPGESARLGSGAPGGFPPGE

SEQ ID NO: 95 - protein, 96 aa, Cyanophage S-2L
  misc_feature: New ORF = left: 7275 right: 7562 frame: 1 size(aa): 96
VSQAWIRRPRRISSRRVRRGYFPAMSRKGRSSDTRVGRGGCATIAQRYATHNAECPRTDPQPEGHPVRPSPGAVGPRPADQGCHAQHRAIPRAEPG

SEQ ID NO: 96 - protein, 60 aa, Cyanophage S-2L
  misc_feature: New ORF = left: 7373 right: 7552 frame: 3 size(aa): 60
HQGGAWRLCYHSTALCHPQCRMPSNGPSTRGAPSTAQPGSSGPSPSGSRVPCAAPSDSTC

SEQ ID NO: 97 - protein, 268 aa, Cyanophage S-2L
  misc_feature: New ORF = left: 7402 right: 8205 frame: -2 size(aa): 268
CRLVSCLPVLYSQHSTQIHRTHPTPGADLEPVALAESDLLDDADQLPVKQDPPLLGPGRTRWGVAQGARMLQVQVVAPGLQVLDRDGAREERRHRLGDGAHERVYDHLHRALRLAALAASARAAAASAWRRRHLAASDSYPGRRISASVSRYPGGSGSPALARISVQSCIGLLAQRLLGHGGIPGDVVPGVVLLGQARDQAANLGGDLVQGLGLNRAQHVESLGAAHGTLDPLGEGPLLPGWAVLGAPLVEGPFEGIRHCGWHSAVLW

SEQ ID NO: 98 - protein, 101 aa, Cyanophage S-2L
  misc_feature: New ORF = left: 7408 right: 7710 frame: 2 size(aa): 101
HSAMPPTMPNALERTLNQRGTQYGPAREQWALAQRIKGAMRSTERFHVLSPVEAEALDQIATKISRLISGLPEQHDTWHDIAGYATVAEQALREEADAGLD

SEQ ID NO: 99 - protein, 100 aa, Cyanophage S-2L
  misc_feature: New ORF = left: 7601 right: 7900 frame: -3 size(aa): 100
ARLRPPSSRPPLGRLGRLCPGRCGLGLETAPLGRLGFVSGPAHLGERLPVPGGLREPRPGQDLSPVLHRPPRAAPARPRWHTRRCRARCRAARAGQRSGG

SEQ ID NO: 100 - protein, 153 aa, Cyanophage S-2L
  misc_feature: New ORF = left: 7602 right: 8060 frame: 1 size(aa): 153
PPDLWPARAARHLARHRRVCHRGRAGAARGGRCRTGLRSWPGRGSRSPPGTGRRSPRCAGPDTNPRRPSGAVSRPRPQRPGQRRPRRPSGGRDEGGRRRAHGRRRPVDVGVLLAPRHGPRLGGLGQPPVPGACGPPGRRPTGCGLVPGVADPA

SEQ ID NO: 101 - protein, 90 aa, Cyanophage S-2L
  misc_feature: New ORF = left: 7610 right: 7879 frame: 3 size(aa): 90
SLACPSSTTPGTTSPGMPPWPSRRCARRPMQDWTEILARAGLPEPPGYRETLAEMRRPGYESEAAKWRRLQAEAAAARAEAAKAAKRRAR

SEQ ID NO: 102 - protein, 159 aa, Cyanophage S-2L
  misc_feature: New ORF = left: 7714 right: 8190 frame: 2 size(aa): 159
DPGQGGAPGAPRVPGDARRDAPARIRIRGGQVAPSPGRGRSGPGRGGQGGQAEGAMKVVVDALMGAVAQSMSAFFSRPVTVQDLEAWGNHLYLEHAGPLGDAPPGAAWSQEWRILLDGQLVGVVQQVAFRQGDRLQVRSRGGVRPMYLCAMLGVEDRKT

SEQ ID NO: 103 - protein, 93 aa, Cyanophage S-2L
  misc_feature: New ORF = left: 7895 right: 8173 frame: 3 size(aa): 93
TRSWAPSPSRCRRSSRAPSRSKTWRPGATTCTWSMRAPWATPHRVRPGPRSGGSCLTGSWSASSSRSLSARATGSRSAPGVGCVRCICVLCWE

SEQ ID NO: 104 - protein, 70 aa, Cyanophage S-2L
  misc_feature: New ORF = left: 7952 right: 8161 frame: -3 size(aa): 70
HTDTSDAPHPGSGPGAGRPGGKRPAGRRRPAARQAGSATPGTRPHPVGRRPGGPHAPGTGGCPRPPSLGP

SEQ ID NO: 105 - protein, 100 aa, Cyanophage S-2L
  misc_feature: New ORF = left: 8064 right: 8363 frame: 1 size(aa): 100
RAAGRRRPAGRFPPGRPAPGPLPGWGASDVSVCYAGSRGPEDMKRDDIKGAPLILATGRGLPPDPNEPPKGDLAAWAAYHGIEYVNRAEEPPAPGEEPRG

SEQ ID NO: 106 - protein, 70 aa, Cyanophage S-2L
  misc_feature: New ORF = left: 8177 right: 8386 frame: 3 size(aa): 70
RTGRHETRRHQGRTADPGHRTRSTPRPERAAQGRPGRLGRLPRHRVRQPGGGATGTWRRTTRVNAPSALG

SEQ ID NO: 107 - protein, 89 aa, Cyanophage S-2L
  misc_feature: New ORF = left: 8224 right: 8490 frame: 2 size(aa): 89
SWPQDAVYPPTRTSRPRATWPPGPPTTASSTSTGRRSHRHLAKNHAGERALSLGLIPTCALGRGGPFLDADHLVADPLRHEHLELVVEL

SEQ ID NO: 108 - protein, 95 aa, Cyanophage S-2L
  misc_feature: New ORF = left: 8247 right: 8531 frame: -1 size(aa): 95
SRTTSTASPSPACQSSTTSSRCSCRRGSATRWSASRKGPPRPRAQVGISPRLRARSPAWFFARCRWLLRPVDVLDAVVGGPGGQVALGRLVRVGG

SEQ ID NO: 109 - protein, 656 aa, Cyanophage S-2L
  misc_feature: New ORF = left: 8320 right: 10287 frame: -2 size(aa): 656
AGSSRPTSRPPAASSRSSRRCPPAGSSGSAPEPDARRHPGPGGRRRRPDRRRAAPGPGPGVLRGAGAGRHLPAGRRGDPGGRCGVDGLSVGVGGVTVTPQQLVAVARDTGFRTFPGLLRKASGQPYTIGTATAAFQQGQTKLIEARLREGFLLSKSNSEIVADVRTAMATANRRQVEALVRTSMAQASQTAHDAFNEANEDVLGDKDGNRYIWDASNDGRLCPVCAPLDGTRYKERKKAPWPAHWNERCRILPLTPLSDTLGALPETYLEQVPVQYDAKGKRLPPPAGWTGEAAYKTPRKINGQQYWVRRRDNPGGTVGAMLQRSNDETAQAVLGTKARLARFRKLTGPKGKYVKDPQGAVVELLRPGSVKKPAPPPKPKPKPKAPKPVVAPPLVQPAPVAPPPAPAPPVVTRAPRRARPAPAPAPAPPAPPRLYSEVRARRNSDTTTDIKHKYRTKHRAVVRDWTGSGYTEIRTAQVKAAQARGMDLTDFGKQMARKQMSDDRLADLLDKADRLEDFITTAPVYKGGPTYRGMRYHSKAAIEEDIRRIRAGEPSITLESWTTDESVSYRFNALYRKDRYSVTYVVEDNLHGVPISSMSKFDDELEVLMPEGVRYEVVRIEEGATPAKSAGGYQPKAEGAFTRVVLRQVPVAPPPG

SEQ ID NO: 110 - protein, 144 aa, Cyanophage S-2L
  misc_feature: New ORF = left: 8378 right: 8809 frame: -3 size(aa): 144
ADGQEADVRRPAGRPTRQGRPARGLHHDGARLQRRPDLPGHALPQQSGHRGGHPPHPSRGAVDHAGKLDHRRVGVLPVQRPVPQGPVLGDIRSRGQPPRRPHLQHVKVRRRARGAHAGGGPLRGGPHRGRGHPGQERRWVSAQG

SEQ ID NO: 111 - protein, 90 aa, Cyanophage S-2L
  misc_feature: New ORF = left: 8494 right: 8763 frame: 2 size(aa): 90
HAGDGDAVEVVLDYVCHRVPVLAVQGVEPVGHRLVGGPAFQRDRRLPGSDAADVLLDGRFAVVAHAPVGRAAFVDGRRRDEVLEPVGLVE

SEQ ID NO: 112 - protein, 93 aa, Cyanophage S-2L
  misc_feature: New ORF = left: 8544 right: 8822 frame: -1 size(aa): 93
PILVSRWPGSRCPTTGWQTYSTRPTGSRTSSRRRPSTKAARPTGACATTAKRPSRRTSAASEPGSRRSRWKAGPPTSRCPTGSTPCTARTGTR

SEQ ID NO: 113 - protein, 54 aa, Cyanophage S-2L
  misc_feature: New ORF = left: 8717 right: 8878 frame: 3 size(aa): 54
TGAVVMKSSSRSALSSRSASRSSDICFLAICLPKSVRSMPRAWAAFTWAVRISV

SEQ ID NO: 114 - protein, 67 aa, Cyanophage S-2L
  misc_feature: New ORF = left: 8736 right: 8936 frame: 1 size(aa): 67
SPRAGRPCRVGLPAGRRTSASWPSAYQNRSDPCPGPGRPSPGRCGSRCNQSRSSRARRPGAWCGTCA

SEQ ID NO: 115 - protein, 436 aa, Cyanophage S-2L
  misc_feature: New ORF = left: 8767 right: 10074 frame: 2 size(aa): 436
VCQPVVGHLLPGHLLTKIGQIHAPGLGGLHLGGADLGVTRAGPVAHDGPVLGAVLVLDVGCGVAITTGTHLRIQPGRCRRCGGRGWGRAGTTWRPGDHGRGRSRRRGHWCGLDQWRGHDGLRSLGLRLGLRRRGGLLDTAGPQELDHGPLGILDVLALGAGQLPEPGQAGLGAEHRLGGFVVGPLQHRPDGAPGVVPAPDPILLAVDLTGRLVGGLPGPAGRRGQSFALGVVLHRHLFEVGLRQGAQGVAQRGERQDPAPLVPVGRPGGLLALLVPGAVERGAHRAEPAVVAGVPDVAVAVLVSQDVLVGLVECVMRRLAGLGHRRTDQGFHLPAVGRGHRRPDVGDDLGVGFGQEEALPEPGLDQLRLPLLECSGRRADGVGLARRLPEEPRECPEARIPGDGHQLLRGDRDAPDAHREAVDAATATGVAPTARR

SEQ ID NO: 116 - protein, 131 aa, Cyanophage S-2L
  misc_feature: New ORF = left: 8856 right: 9248 frame: -1 size(aa): 131
PAPRASTSRIPRGPWSSSCGPAVSRSPPRLRSPSRSPRLRSPSWPLHWSSPHQWPRRRLRPLPWSPGRHVVPARPQPRPPHRRHRPGCILRCVPVVIATPQPTSSTSTAPSTGPSCATGPALVTPRSAPPR

SEQ ID NO: 117 - protein, 174 aa, Cyanophage S-2L
  misc_feature: New ORF = left: 8882 right: 9403 frame: 3 size(aa): 174
PEPVQSRTTARCLVRYLCLMSVVVSLLRRARTSEYSLGGAGGAGAGAGAGRARRGARVTTGGAGAGGGATGAGWTNGGATTGFGALGFGLGFGGGAGFLTLPGRRSSTTAPWGSLTYLPLGPVSFRNRARRALVPSTAWAVSSLDRCSIAPTVPPGLSRRRTQYCWPLILRGVL

SEQ ID NO: 118 - protein, 136 aa, Cyanophage S-2L
  misc_feature: New ORF = left: 8981 right: 9388 frame: -3 size(aa): 136
DQRPAVLGPAPGQPRGHRRGDAAAVQRRNRPGGARHQGPPGPVPEADRPQGQVRQGSPGGRGRAPAARQCQEARPASEAQAEAQGSEARRGPSIGPARTSGPAAGSGPSRGHPGATSCPPGPSPGPRTAGTAQAVF

SEQ ID NO: 119 - protein, 52 aa, Cyanophage S-2L
  misc_feature: New ORF = left: 9228 right: 9383 frame: 1 size(aa): 52
RTCPWGRSASGTGPGGPWCRAPPGRFRRWTAAASPRRCPRGCPGAGPNTAGR

SEQ ID NO: 120 - protein, 88 aa, Cyanophage S-2L
  misc_feature: New ORF = left: 9252 right: 9515 frame: -1 size(aa): 88
ATPWAPCRRPTSNRCRCSTTPRANDCPRRPAGPGRPPTRRPVRSTASSIGSGAGTTPGAPSGRCCSGPTTKPPRRCSAPRPAWPGSGS

SEQ ID NO: 121 - protein, 106 aa, Cyanophage S-2L
  misc_feature: New ORF = left: 9392 right: 9709 frame: -3 size(aa): 106
RIQRGQRGRPGRQGRQPLHLGRQQRRPALPGVRPARRHQVQGAQEGPLAGPLERAVPDPAAHPAERHPGRPAGDLPRTGAGAVRRQGQTTAPAGRLDRGGRLQDAP

SEQ ID NO: 122 - protein, 56 aa, Cyanophage S-2L
  misc_feature: New ORF = left: 9488 right: 9655 frame: 3 size(aa): 56
VSGRAPRVSLSGVSGRIRHRSFQWAGQGAFLRSLYLVPSSGAHTGQSRPSLLASQM

SEQ ID NO: 123 - protein, 114 aa, Cyanophage S-2L
  misc_feature: New ORF = left: 9519 right: 9860 frame: -1 size(aa): 114
SRPGSGRASSCPNPTPRSSPTSGRRWPRPTAGRWKPWSVRRWPRPARRRMTHSTRPTRTSWETRTATATSGTPATTAGSARCAPRSTAPGTRSARRPPGRPTGTSGAGSCRSPR

SEQ ID NO: 124 - protein, 58 aa, Cyanophage S-2L
  misc_feature: New ORF = left: 9528 right: 9701 frame: 1 size(aa): 58
AAGSGTARSSGPARGPSCAPCTWCRRAGRTPGRAGRRCWRPRCSGCRPCLPGRPRWPR

SEQ ID NO: 125 - protein, 84 aa, Cyanophage S-2L
  misc_feature: New ORF = left: 9659 right: 9910 frame: 3 size(aa): 84
RLPSLSPRTSSLASLNASCAVWLAWAIDVRTRASTCRRLAVAIAVRTSATISELDLDRRKPSRSRASISFVCPCWNAAVAVPMV

SEQ ID NO: 126 - protein, 97 aa, Cyanophage S-2L
  misc_feature: New ORF = left: 9705 right: 9995 frame: 1 size(aa): 97
MRHAPSGWPGPSTYGPGLPPAGGWPWPSPSGRRRRSRSWIWTGGSPPGAGPRSASSAPAGMQRSPCRWCRAGPTPSGGAQGMSGSPYPGRRPPAAAG

SEQ ID NO: 127 - protein, 160 aa, Cyanophage S-2L
  misc_feature: New ORF = left: 9713 right: 10192 frame: -3 size(aa): 160
TRRSPSSRPRWPPSATGSTPCCPRPRPRRSPRGWCRPTPTCGPSGRPRWPLRRRRPLGGRRGRHGHPAAAGGRRPGYGLPDIPWAPPEGVGPALHHRHGDRCIPAGADEADRGPAPGGLPPVQIQLRDRRRRPDGDGHGQPPAGGSPGPYVDGPGQPDGA

SEQ ID NO: 128 - protein, 223 aa, Cyanophage S-2L
  misc_feature: New ORF = left: 9864 right: 10532 frame: -1 size(aa): 223
RSGRPANGCPTAWTSRSSGTPSRARRPRRPRRSSTRRPTPRIRRPTRKPTRRPTPRRLTSESPGPGRPGPVRPPQPLESGAEPDPPDLRAGHPPHPRGAPDAARRPARAAVRLNQTLAVIQAQVAAVGDRIDAVLPPAQAQAFSEGLVQADTYLRAVGATPVAVAASTASRWASGASRSPRSSWWPSPGIRASGHSLGSSGRRRASPTPSARRPLHSSRGRRS

SEQ ID NO: 129 - protein, 87 aa, Cyanophage S-2L
  misc_feature: New ORF = left: 9914 right: 10174 frame: 3 size(aa): 87
GWPDAFRRSPGNVRKPVSRATATSCCGVTVTPPTPTERPSTPQRPPGSPRRPAGRCRPAPAPRRTPGPGPGAARRRSGRRRRPPGPG

SEQ ID NO: 130 - protein, 88 aa, Cyanophage S-2L
  misc_feature: New ORF = left: 10005 right: 10268 frame: 1 size(aa): 88
RPRRPPRGRRRRNGHRGRPDGPQVGVGLHQPLGERLGLGRGQHGVDPVADGGHLGLDDGERLVQAHCRSSRPAGSVWSSSRMRRVACS

SEQ ID NO: 131 - protein, 522 aa, Cyanophage S-2L
  misc_feature: New ORF = left: 10078 right: 11643 frame: 2 size(aa): 522
VSACTSPSENAWAWAGGSTASIRSPTAATWAWMTASVWFRRTAARAGRRAASGAPRGCGGWPARRSGGSGSAPDSRGCGGRTGPGRPGPGDSLVSLRGVGLRVGFRVGLRIRGVGLRVELLLGLLGLLALDGVPELLDVHAVGQPFAGLPDRQEGLQVDAAIDVRLEVELRLLLSQLGVVEVAVDDDRGRLPAGVLPTPVHDDLERRGQVSGDDREHAVGFGPVKCLGPLGLLEGLLLGEDRDAQLGDLLLEHLQFFLVRLAAGPGDLAILGAPTDGVLQGAVDREPDLAIGVGRVQVVGLLVVVALPADHVKDGLAGNRQHLGQVAAPLEMGQVEMGAVLERGPAEQHPLLLAVGRGQGDLFECGVAALVLDLLPGGAGQAQHLVGARGQHPDLLLDVDPVLAGGHLDVLPDPHLLEAGALPGVVPAADGGPAGHLHQKWLVPGQPLVEQALAFLAGVVGQDRAMPVRDGQPERYPGEVVQGGALTVHVFAPLLPVGLVAPLQLDRLPEDQAGAPRIRRAR

SEQ ID NO: 132 - protein, 134 aa, Cyanophage S-2L
  misc_feature: New ORF = left: 10178 right: 10579 frame: 3 size(aa): 134
RRASGSGALPLEPAGGQRLELLEDAAGGLLVGREDPAQRLIREAAEGELVPDDQGLGIHSSVSGGSASGSASGSASGSGVSASGSSSSSVSSASSPSMVSRSSSTSTLSGSHSPVCQTVRKVSRSMPPSMYALR

SEQ ID NO: 133 - protein, 54 aa, Cyanophage S-2L
  misc_feature: New ORF = left: 10196 right: 10357 frame: -3 size(aa): 54
RVNPQALVVRDQFALRSLSNQALSRILPTYEQATRRILEELQTLPAGRLERQCA

SEQ ID NO: 134 - protein, 92 aa, Cyanophage S-2L
  misc_feature: New ORF = left: 10299 right: 10574 frame: 1 size(aa): 92
FERLRRANWSRTTRAWGFTRQSPGGRPPGRLPGRPPDPGCRPPGRAPPRSPRPPRPRWCPGAPRRPRCRAAIRRSARPSGRSPGRCRHRCTP

SEQ ID NO: 135 - protein, 445 aa, Cyanophage S-2L
  misc_feature: New ORF = left: 10354 right: 11688 frame: -2 size(aa): 445
TAVHRAGLPGGVHPLPGPPDPGGAGLILRKPIQLQGGDEAYWEEWRKDVDRQGSSLDDFARVTLGLAISYGHSSVLADYTSEERQSLLDQRLAGDKPFLVQVPCWATIGRRHNPREGSGLQQVRIREYVEVPAGKYGVNVEEQIRVLTPGAYEVLRLTGTAWEKVEDESGDTTLKEIPLATTYSQKEGVLLSRPPLEDCAHLNLAHFQRRSDLTQVLTIAGQPILDMVGWEGDDDEEADDLDPTNTDGEIGLSVNSALQYPIGGGSKYCEITGASCEAHQKELEVLKEQITQLGISVLTQQQTFQETEGAKTLDRAESNSMLSVIARDLASTLQIVMNWCGEYTGREASTVVIDSDFDHAKLTKEEAELYLKAYIDGGIDLETFLTVWQTGEWLPDSVDVEELRDTIEGEEAEETEEELDPEADTPDPEADPEADPEADPPETDE

SEQ ID NO: 136 - protein, 79 aa, Cyanophage S-2L
  misc_feature: New ORF = left: 10361 right: 10597 frame: -3 size(aa): 79
GGGGALPQGVHRWRHRPGDLPDGLADRRMAARQRGRRGAPGHHRGRGGRGDRGGARPGGRHPGSGGRPGSRPGGRPPGD

SEQ ID NO: 137 - protein, 186 aa, Cyanophage S-2L
  misc_feature: New ORF = left: 10583 right: 11140 frame: 3 size(aa): 186
SSASSLVSLAWSKSLSMTTVDASRPVYSPHQFMTIWSVEARSRAMTESMLLDSARSSVLAPSVSWKVCCWVRTEMPSWVICSLSTSSSFWCASQLAPVISQYLEPPPMGYCKALLTESPISPSVLVGSRSSASSSSSPSQPTMSRMGWPAIVSTWVRSLRRWKWARLRWAQSSSGGRLSSTPSFWL

SEQ ID NO: 138 - protein, 119 aa, Cyanophage S-2L
  misc_feature: New ORF = left: 10680 right: 11036 frame: -1 size(aa): 119
RLPASPSLTWSAGRATTTRRPTTWTRPTPMARSGSRSTAPCSTPSVGAPSIARSPGPAARRTRKNWRCSRSRSPSWASRSSPSSRPSKRPRGPRHLTGPNPTACSRSSPETWPRRSRSS

SEQ ID NO: 139 - protein, 87 aa, Cyanophage S-2L
  misc_feature: New ORF = left: 10751 right: 11011 frame: -3 size(aa): 87
HGRLGGRRRRGGRRPGPDQHRWRDRALGQQRLAVPHRWGLQVLRDHRGQLRGAPERTGGAQGADHPAGHLGPHPAADLPRDRGGQDT

SEQ ID NO: 140 - protein, 51 aa, Cyanophage S-2L
  misc_feature: New ORF = left: 10929 right: 11081 frame: 1 size(aa): 51
PRARSRHRCWSGPGRRPPRRRRPPSRPCQGWAGRQSSAPGSGRCAVGNGPG

SEQ ID NO: 141 - protein, 152 aa, Cyanophage S-2L
  misc_feature: New ORF = left: 11015 right: 11470 frame: -3 size(aa): 152
LGPGRLHQRGTPEPARPAAGRGQAISGAGALLGHHRPPAQPPGGLRPPAGADPGVRRGARRQVRGQRRGADPGADPGRLRGAAPDRHRLGEGRGRERRHHTQRDPPGHDLQPKGGGAAQPAPARGLRPSQPGPFPTAQRPDPGADDCRPAHP

SEQ ID NO: 142 - protein, 55 aa, Cyanophage S-2L
  misc_feature: New ORF = left: 11052 right: 11216 frame: -1 size(aa): 55
PAPPGRRSRTRAATPHSKRSPWPRPTAKRRGCCSAGPRSRTAPISTWPISNGAAT

SEQ ID NO: 143 - protein, 72 aa, Cyanophage S-2L
  misc_feature: New ORF = left: 11237 right: 11452 frame: 3 size(aa): 72
APGVSTRICSSTLTPYLPAGTSTYSRIRTCWRPEPSRGLCRRPMVAQQGTCTRNGLSPASRWSSRLWRSSLV

SEQ ID NO: 144 - protein, 84 aa, Cyanophage S-2L
  misc_feature: New ORF = left: 11250 right: 11501 frame: -1 size(aa): 84
RSGWPSLTGIARSWPTTPARNARACSTSGWPGTSHFWCRCPAGPPSAAGTTPGRAPASSRCGSGSTSRCPPASTGSTSRSRSGC

SEQ ID NO: 145 - protein, 239 aa, Cyanophage S-2L
  misc_feature: New ORF = left: 11277 right: 11993 frame: 1 size(aa): 239
PRTCRRAPRRTPGSAPAGGRSPPGGCAGGRWWPSRAPAPEMACPRPAAGRAGSGVPRWCSRPGPSYARKRWPARALPGRSRPGRSPDGPRLCATPPSRPRRPPAAGSASGGSGRRPPDQAGQVGGVHRPGDPPDVLPFTLPGEPGQVVIAERPEVPDALQVGPDHLPAAQHHPVGQVRFVRVVRRQGVSSQLCLGQGLGIQDRVIPPAEGGIHRGGGGRLSHTPELRPARSWKSRNASP

SEQ ID NO: 146 - protein, 52 aa, Cyanophage S-2L
  misc_feature: New ORF = left: 11474 right: 11629 frame: -3 size(aa): 52
SGGRRPDPPEADPAAGGRRGLLGGVAQRRGPSGLLPGRLRPGNARAGHLLRA

SEQ ID NO: 147 - protein, 128 aa, Cyanophage S-2L
  misc_feature: New ORF = left: 11570 right: 11953 frame: 3 size(aa): 128
ASSPPCSWIGFRRIRPAPPGSGGPGRGCTPPGRPARCTAVYAPGGTGAGSNRRTPGGTGRPPGWPGSPPSGAASPGRSGPVRSGRPAPGSLLPALPRPGPRDSGPCDPASRGRDPSGRRRASQSYPGA

SEQ ID NO: 148 - protein, 186 aa, Cyanophage S-2L
  misc_feature: New ORF = left: 11613 right: 12170 frame: -1 size(aa): 186
PPTASATIAFTPGARRPSRASEASASRRGPRASPSTRSPGSSTGRTAWGTWPCRPATASRAGVPALPTSRWSKLRGMTETPSSAPMDPALGWRDHTVLNPEALAEAKLGGDSLAPDDPNEPDLTYRVMLRRWEVIRANLEGVRYLRAFCDYYLPRFPRERKRQYIGRVSRAVYTPYLARLIRGAPA

SEQ ID NO: 149 - protein, 81 aa, Cyanophage S-2L
  misc_feature: New ORF = left: 11692 right: 11934 frame: -2 size(aa): 81
DALLRPDGSRPRLAGSHGPESRGPGRGKAGRRLPGAGRPERTGPDLPGDAAPLGGDPGQPGGRPVPPGVLRLLPAPVPPGA

SEQ ID NO: 150 - protein, 438 aa, Cyanophage S-2L
  misc_feature: New ORF = left: 11890 right: 13203 frame: 2 size(aa): 438
SRQPRAGSIGAEEGVSVIPRSLDQREVGRAGTPALDAVAGRQGQVPQAVRPVLDPGLLVDGEALGPLLDADASEALDGLLAPGVNAIVALAVGGHDQRVRRVELVLDAPGGVRGEDLEAVLPEDRMVGDAGLGGRLPAVARRVGADHDLAPLEPLGQVAPHLVGVAVRHVDLVPLQQPLAREDRADDAGHHRHVKVEADVDRAAVVLGALPDVLLAEVVVGPAGSSLEAGLVLLAEGAGVEVVPGLLDLGLGDPAALDGGELEAGPFRVLLHRLPELVVMVEALRGGDLPARPLLVRQRRLQHLGPELRLGERRLVDDGPGQAVAPEAVGVVRPKERQRRPVPQVDPELGVVDAGDICRVDQLLEALPGDPLGRPVGRGDVPVVALRVGHAPVPEADQGQVRLAEAPAAGEQDVAPAARVDLRLGAAELPDRLALIKS

SEQ ID NO: 151 - protein, 176 aa, Cyanophage S-2L
  misc_feature: >New ORF = left: 11942 right: 12469 frame: -3 size(aa): 176
RVGDGRRHLLDPPGQAAAAVGRDQHAEQQHRRGGALPGRAVPGAQGRGLPRPDGQQPEDVRRGRRHRPYDPPEARPQGPHPELPLGRQGQAQRDERAGHDRRRRAPLSHSPPVQEDHQGPPRRLRQGGGRGLRHRQEARDRALDGRPGVPGPVGLQPRQGLAFRLFQLLAGLSSGV

SEQ ID NO: 152 - protein, 448 aa, Cyanophage S-2L
  misc_feature: >New ORF = left: 11956 right: 13299 frame: -2 size(aa): 448
GGGYGRRTRYMLFPATCGGTILGSRSGRGSNLAFDERQSIRELSGPQAQIYTCGRRNVLLTCGRRFGKTHLALIRLRNWGMSHPEGNYWYVAPTYRAAKRIAWKRLKKLIDPTYVAGINNTELRIDLWNGATLTLFGADNPDSLRGDSLSGAVIDEAAFTKPELWTEVLQPALSDQEGPCWQITTPKGFNHYHELWESVEEDPEWARFEFTTIQGGRVSEAEIEKARNHLDPRTFRQEYEASFEAAAGRAYYDFGQENIWEGAEDNGGTVYVGLDFNVSVMAGVICSILPGKRLLQWDEINMPNSNTDEVGRYLAERFQGRKVVVCPDPTGNSRKTSAEAGVTDHTILRKHGLKVLTPNSPWGVKDKLNATNALVMTADGERHYRIHPRCKKTIKGLRGVCVKEGAEGFAIDKKPGIEHWTDGLGYLALSACNRVKGWRSGSSNFSLV

SEQ ID NO: 153 - protein, 61 aa, Cyanophage S-2L
  misc_feature: >New ORF = left: 11957 right: 12139 frame: 3 size(aa): 61
TSEKLEEPERQPLTRLQADRARYPRPSVQCSIPGFLSMAKPSAPSLTQTPRRPLMVFLHRG

SEQ ID NO: 154 - protein, 70 aa, Cyanophage S-2L
  misc_feature: >New ORF = left: 12152 right: 12361 frame: 3 size(aa): 70
WRSPSAVMTSAFVALSLSLTPQGEFGVRTLRPCFRRIVWSVTPASADVFRLLPVGSGQTTTLRPWNRSAR

SEQ ID NO: 155 - protein, 95 aa, Cyanophage S-2L
  misc_feature: >New ORF = left: 12174 right: 12458 frame: -1 size(aa): 95
WPASSARSSRASGCCSGTRSTCRTATPTRWGATWPSGSRGARSWSAPTRRATAGRRPPRPASPTIRSSGSTASRSSPRTPPGASRTSSTRRTRWS

SEQ ID NO: 156 - protein, 146 aa, Cyanophage S-2L
  misc_feature: >New ORF = left: 12462 right: 12899 frame: -1 size(aa): 146
RSLGRTTPTASGATACPGPSSTRRRSPSRSSGPRCCSRRCRTRRGRAGRSPPRRASTITTSSGSRWRRTRNGPASSSPPSRAAGSPRPRSRRPGTTSTPAPSARSTRPASRLLPAGPTTTSARRTSGRAPRTTAARSTSASTLTCR

SEQ ID NO: 157 - protein, 240 aa, Cyanophage S-2L
  misc_feature: >New ORF = left: 12473 right: 13192 frame: -3 size(aa): 240
APVDPGAQRPPGADLHVRPAQRPAHLRPALRQDAPGPDPPPELGHVPPGGQLLVRRPDLPGGQADRLEAPQEADRPDICRRHQQHRAPDRPVERGDADALWGGQPRQPPGRQPVRGRHRRGGVHQAGALDRGAAAGAVGPGGAVLADHHPEGLQPLPRALGVGGGGPGMGPLRVHHHPGRPGLRGRDREGPEPPRPPHLPPGVRGQLRGCCRPGLLRLRPGEHLGGRRGQRRHGLRRPRL

SEQ ID NO: 158 - protein, 65 aa, Cyanophage S-2L
  misc_feature: >New ORF = left: 12474 right: 12668 frame: 1 size(aa): 65
SRGRRRPCRRCPRRPPRCSPGRSRSRPGRQQPRSWPRTPGGRCGGRGGSGPSRSRPRRPGRPGWW

SEQ ID NO: 159 - protein, 58 aa, Cyanophage S-2L
  misc_feature: >New ORF = left: 12551 right: 12724 frame: 3 size(aa): 58
ARPAAASKLASYSWRKVRGSRWFRAFSISASETRPPWMVVNSKRAHSGSSSTDSQSSW

SEQ ID NO: 160 - protein, 96 aa, Cyanophage S-2L
  misc_feature: >New ORF = left: 12728 right: 13015 frame: 3 size(aa): 96
WLKPFGVVICQHGPSWSDSAGCSTSVQSSGLVNAASSMTAPDRLSPRRLSGLSAPKSVSVAPFHRSIRSSVLLMPATYVGSISFLRRFQAIRLAAR

SEQ ID NO: 161 - protein, 151 aa, Cyanophage S-2L
  misc_feature: >New ORF = left: 13173 right: 13625 frame: 1 size(aa): 151
APGSTGAHQKLGWIPGPTGSRGSCRRRWLGRACSGYDAHILHLNSGSVPQLQDELLPIEAVDLRLREHAKQVLESGLGDRPVPAPEAAVGPWVREGPVSQPGQPLVEPVGQHHVFLIVRSNWNMSSSCTSTSNTESIRRRFICSISRCWTS

SEQ ID NO: 162 - protein, 90 aa, Cyanophage S-2L
  misc_feature: >New ORF = left: 13199 right: 13468 frame: -3 size(aa): 90
ETGPSLTQGPTAASGAGTGRSPRPDSRTCLACSRRRRSTASIGRSSSCSCGTEPLLRWRIWASYPLHALPSHLRRHDPRLPVGPGIQPSF

SEQ ID NO: 163 - protein, 312 aa, Cyanophage S-2L
  misc_feature: >New ORF = left: 13206 right: 14141 frame: -1 size(aa): 312
PRPSAPSSPSTGPAPGPEPITAPCATSPVPIPPPSHDTPDHRDLRAPEGVPHQPVGDRPDDLPAEHRRTHVARLAPVPGLGRCRRHAPAHGPPGLRVCPGPRPGRDPDGRRPDAPQDPGAQGAPGRHRGPDRPGGGRARGDHGPGGQRALEVLRHRRGRPVPQGQRPGRPRLRRPAPADGADETAPDGLGVGCGGAGRAHVPVRADDQEDVMLPHRLHERLARLRDWALSHPGADCRLWCGDRAIAEARFEDLLGMLAQAEIDCFDRQELVLQLRNRATIKVEDMGVVPATCSSQPPAAARSSAPGRAGDPT

SEQ ID NO: 164 - protein, 81 aa, Cyanophage S-2L
  misc_feature: >New ORF = left: 13207 right: 13449 frame: 2 size(aa): 81
VGSPARPGAEDRAAAGGWEEHVAGTTPISSTLIVALFRSCRTSSCRSKQSISACASMPSRSSNRASAIARSPHQRRQSAPG

SEQ ID NO: 165 - protein, 93 aa, Cyanophage S-2L
  misc_feature: >New ORF = left: 13303 right: 13581 frame: -2 size(aa): 93
WTRCWMWRCRTSSCSSSSGRSRRRDAAPQAPRAAGPVERLGPLSPRGRLPPLVRGPGDRRGPIRGPAWHARAGGDRLLRSAGARPAAAEQSHY

SEQ ID NO: 166 - protein, 344 aa, Cyanophage S-2L
  misc_feature: >New ORF = left: 13307 right: 14338 frame: 3 size(aa): 344
WLCSAAAGRAPADRSSRSPPARACQAGPRIGPRRSPGPRTRGGSRPLGERGPSLSTGPAARGACGAASRLLDRPLELEHELVLHLHIQHRVHQAPFHLLHQQVLDVVGVGAQAVDLEEQDGLGGVAELPKLSGLRGHGRLELGHLRDDLGLDAGQELLELRGLVGRRGVARPDLGQVVDQGKLAGLADRVLGHAGGSAPVPAQEPNAPHVFGDVLRVGRLDDPPPADVGRPQALVGLGDLECHGKEGVSEPGMWRMAPLSARAQERARLMASLARMASVTSTPRSVARSRARIRTSATSSGSWARSLAINSPISSRSLAMVRRGGGRGSGGGSRRRSPPGAQRR

SEQ ID NO: 167 - protein, 190 aa, Cyanophage S-2L
  misc_feature: >New ORF = left: 13511 right: 14080 frame: -3 size(aa): 190
RRHAPHPRFRYPLLPMTLQITETYERLRASHISRWGIVQTTYPQNIAEHMWRVWLLCRDWGAAAGMPQHTVRQACEFALVHDLAEIRTGDAPTPHKTPELKELLAGIEAQIVPEVAELEATMAPEARELWKFCDTAEAVLFLKVNGLGAHAYDVQHLLMEQMKRRLMDSVLDVEVQDELMFQFERTIKKT

SEQ ID NO: 168 - protein, 130 aa, Cyanophage S-2L
  misc_feature: >New ORF = left: 13609 right: 13998 frame: -2 size(aa): 130
GRPTSAGGGSSRRPTRRTSPNTCGAFGSCAGTGALPPACPSTRSARPASLPWSTTWPRSGRATPRRPTRPRSSRSSWPASRPRSSRRWPSSRRPWPRRPESFGSSATPPRPSCSSRSTAWAPTPTTSSTC

SEQ ID NO: 169 - protein, 109 aa, Cyanophage S-2L
  misc_feature: >New ORF = left: 13629 right: 13955 frame: 1 size(aa): 109
AWAPRPLTLRNRTASAVSQNFQSSLASGAMVASSSATSGTIWASMPARSSLSSGVLWGVGASPVRISARSWTRANSQAWRTVCWGMPAAAPQSRHRSQTRHMCSAMFCG

SEQ ID NO: 170 - protein, 67 aa, Cyanophage S-2L
  misc_feature: >New ORF = left: 13783 right: 13983 frame: 2 size(aa): 67
APGSCGASGRRPSGSRPGRGPGQTRRPGGPCAGACRRQRPSPGTGAKRATCVRRCSAGRSSGRSPTG

SEQ ID NO: 171 - protein, 131 aa, Cyanophage S-2L
  misc_feature: >New ORF = left: 14023 right: 14415 frame: 2 size(aa): 131
SGVSWEGGGIGTGDVAHGAVIGSGPGAGPVDGELGADGLGHVDAQERRQVEGQDQDVGHLERVVGPVAGDQLPDLLQELGDGAPGRRSGFRGWIQAAISAWSSATVAGIQTFELCPGGGVVDVGDFGPKPT

SEQ ID NO: 172 - protein, 98 aa, Cyanophage S-2L
  misc_feature: >New ORF = left: 14035 right: 14328 frame: -2 size(aa): 98
APGGDRRLDPPPEPRPPPRRTIAKLLEEIGELIASDRAHDPLEVADVLILALDLATLLGVDVTEAIRAKLAINRARSWARADNGAMRHIPGSDTPSFP

SEQ ID NO: 173 - protein, 69 aa, Cyanophage S-2L
  misc_feature: >New ORF = left: 14084 right: 14290 frame: -3 size(aa): 69
TPTAAPAHHRQAPGGDRGVDRQRPGPRPARGGRRPDPGPRPGDAPGRRRDRGHPRQARHQPGPLLGPSR

SEQ ID NO: 174 - protein, 93 aa, Cyanophage S-2L
  misc_feature: >New ORF = left: 14115 right: 14393 frame: 1 size(aa): 93
WRAWRGWPRSRRRPGASPGRGPGSGRRPPRAGRGPGRWRSTPRSPPGAWRWCAGAAVGVQGVDPGGDLRLELSDGSGHTNLRALPGWGCGRRR

SEQ ID NO: 175 - protein, 419 aa, Cyanophage S-2L
  misc_feature: >New ORF = left: 14235 right: 15491 frame: -1 size(aa): 419
TTSGASSRRRPSRRGPGVPSWTADPGRAMLSIPPYYRVKNCNLIVDCQYGSTGKGLLAGYLGALEAPQVLCMAPSPNAGHTLVEEDGTARVHKMLPLGITSPSLERIYLGPGSVIDMDRLLEEYLALPRQVELWVHQNAAVVLQEHRDEEAAGGLAPGSTRSGAGSAFIAKIRRRPGTLLFGEAVRDHPLHGVVRVVDTRTAQDMLFRTRSIQAEGCQGYSLSVHHGAYPYCTARDVTTAQLIADCGLPYDVARIARVVGSMRTYPIRVANRPEAGEWSAPCYPDSVECQFADLGLEQEYTTVTKLPRRIFTFSAIQAHEAIAQNGVDEVFLNFAQYPPSLGALEDILDAIEARAEVTYVGFGPKSPTSTTPPPGQSSKVCMPATVAELQAEIAAWIHPLNPDRRPGAPSPSSWRRSGS

SEQ ID NO: 176 - protein, 73 aa, Cyanophage S-2L
  misc_feature: >New ORF = left: 14332 right: 14550 frame: -2 size(aa): 73
RHPGARGHRPERRGRGVPQLRPVPAQPRGSRGHPRRHRGQGGGDLRRLRPEVTDVYHTPTRAELEGLYARYRR

SEQ ID NO: 177 - protein, 244 aa, Cyanophage S-2L
  misc_feature: >New ORF = left: 14397 right: 15128 frame: 1 size(aa): 244
LRAEADVGHLRPGLDGVEDVLESPEAGRVLGEVEEHLVHAVLGDGLVRLDGAKRKDPAGELRHGGVLLLQAQVGELALDRVGVAGGAPLTGLRAVGHPDRVGPHRADDPGDPGDVVGQAAVGDQLGRRDVPGGAVGVGPVVDRQAVALAPLGLDRPGPKQHVLGGPGVDDPDDTVERVIPDGLTEQERPRAAADLGDKRRAGAAAGRAWGQAPGGLLIPVLLEDDGGVLVDPELHLPGEGQVLL

SEQ ID NO: 178 - protein, 75 aa, Cyanophage S-2L
  misc_feature: >New ORF = left: 14419 right: 14643 frame: 2 size(aa): 75
VTSALASMASRMSSRAPRLGGYWAKLRNTSSTPFWAMASCAWMALNVKIRRGSFVTVVYSCSRPRSANWHSTESG

SEQ ID NO: 179 - protein, 53 aa, Cyanophage S-2L
  misc_feature: >New ORF = left: 14423 right: 14581 frame: -3 size(aa): 53
RSSPAGSLRLAPSRRTRPSPRTAWTRCSSTSPSTRPASGLSRTSSTPSRPGRR

SEQ ID NO: 180 - protein, 73 aa, Cyanophage S-2L
  misc_feature: >New ORF = left: 14561 right: 14779 frame: 3 size(aa): 73
RSGGGASSRWCTPAPGPGRRTGTRPSRGSRGRSTHRPPGGWPPGSGRSASSRRPGRSGRRRRAGRSRRSAGPS

SEQ ID NO: 181 - protein, 60 aa, Cyanophage S-2L
  misc_feature: >New ORF = left: 14585 right: 14764 frame: -3 size(aa): 60
SPTAACPTTSPGSPGSSARCGPTRSGWPTARRPVSGAPPATPTRSSASSPTWAWSRSTPP

SEQ ID NO: 182 - protein, 93 aa, Cyanophage S-2L
  misc_feature: >New ORF = left: 14665 right: 14943 frame: -2 size(aa): 93
GRPGSPAPRCRPGRRHPDRPGHAVSDPVDPGRGVPGLQPVGPPRGLPLLHRPGRHDGPADRRLRPALRRRPDRPGRRLDADLPDPGGQPPGGR

SEQ ID NO: 183 - protein, 120 aa, Cyanophage S-2L
  misc_feature: >New ORF = left: 14768 right: 15127 frame: -3 size(aa): 120
RSTWPSPGRWSSGSTRTPPSSSRSTGMRRPPGAWPQARPAAAPARRLSPRSAAALGRSCSVRPSGITRSTVSSGSSTPGPPRTCCFGPGRSRPRGARATACRSTTGPTPTAPPGTSRRPS

SEQ ID NO: 184 - protein, 68 aa, Cyanophage S-2L
  misc_feature: >New ORF = left: 14783 right: 14986 frame: 3 size(aa): 68
RPGRCSRGRPRGGPTGCSPGTPRPGSTGSETACPGRSGCRRPGRHRGAGDPGRPHRTGASQGGGGSWR

SEQ ID NO: 185 - protein, 79 aa, Cyanophage S-2L
  misc_feature: >New ORF = left: 14932 right: 15168 frame: 2 size(aa): 79
SRTASPNRSVPGRRRILAINAEPAPLRVEPGARPPAASSSRCSWRTTAAFWWTQSSTCRGRARYSSRSRSMSITEPGPR

SEQ ID NO: 186 - protein, 68 aa, Cyanophage S-2L
  misc_feature: >New ORF = left: 14990 right: 15193 frame: 3 size(aa): 68
TPSRRRCGSSLGPGPRRPPHPGAPGGRRRRSGGPRAPPAGGGPGTPLGAGPCRSPSRGPGRSAQGWGW

SEQ ID NO: 187 - protein, 113 aa, Cyanophage S-2L
  misc_feature: >New ORF = left: 15132 right: 15470 frame: 1 size(aa): 113
EPVHVDHRAGAQVDPLKAGAGDAQGQHLVDAGGAVLLDQGVAGVGAGCHAQHLRGLERPQVAGQEPLAGAAVLAVDDQVAVLHAIVGGNGQHSTAGVSRPGWDAWASPRWPSP

SEQ ID NO: 188 - protein, 70 aa, Cyanophage S-2L
  misc_feature: >New ORF = left: 15152 right: 15361 frame: -3 size(aa): 70
SSTASTAAPARGSWPATWGRSRPRRCCAWHPAPTPATPWSRRTAPPASTRCCPWASPAPALSGSTWAPAR

SEQ ID NO: 189 - protein, 80 aa, Cyanophage S-2L
  misc_feature: >New ORF = left: 15181 right: 15420 frame: -2 size(aa): 80
PRPCYAVHSPLLSREELQPDRRLPVRQHRQGAPGRLPGGARGPAGAVHGTQPQRRPHPGRGGRHRPRPQDAAPGHHQPQP

SEQ ID NO: 190 - protein, 70 aa, Cyanophage S-2L
  misc_feature: >New ORF = left: 15197 right: 15406 frame: 3 size(aa): 70
CPGAASCGRGRCRPPRPGCGRRWGWVPCTAPAGPRAPPGSRPGAPCRCCRTGSRRSGCSSSRDSRGEWTA

SEQ ID NO: 191 - protein, 337 aa, Cyanophage S-2L
  misc_feature: >New ORF = left: 15380 right: 16390 frame: -3 size(aa): 337
LPVLEPGRGRPVRPQALHLRVEEAEPQRQALHLAPDPAAPERVPRPAPAAAPGPGPPGPCAPGAPGRCPSPALLEPPDRPVGDAPARPGPGTRTGRAAAPAGVEPPDPAVGDPGSPSRSGPGPGGPGLRARRLPGPAVRPSGRPAADPGPGRRSAPRRRPGADRPAPGVAVPGAGPDRRPGRGRNPVLTDRSQGLRKGPLPVQTTPPLHPRESQHPRRRQAASDRYQAARIHRASKRGRDPGHGRLAHRRPRQIHPPRQRQPGSPCCHPPGHPQHLGGRPACHDPGFLGLDREAPADTPELHPGPVQGEGHRGEAQASHPGRLTPAVLCCPFPPTIA

SEQ ID NO: 192 - protein, 386 aa, Cyanophage S-2L
  misc_feature: >New ORF = left: 15391 right: 16548 frame: 2 size(aa): 386
GGMDSIARPGSAVQDGTPGPLLDGLLLELAPDVVQVCLPELLGPVPKTLGHGRQAALPGAVDDPADDSMEIPAAVVSADEFVEAVDAPGDHAQDLGLSLKLGVSSQLGSDLTQPDGGVGVETHGGGVVEWFVRGGAPCGAPGIDRSERDFVLAQDAGRGRRLGLPHRGLAGRHRGACVERCADLGRGRLRGGRRGVRLARGAALPVGRGRRGRGLSGRGSRGHPLLGLGVPHRLGRLRGRCGCRGRGGLGRHPLAGLGVPVGLGRGTGRGRLGRMGLGGRGLALLLGQAEERVPGRLDLERDVRLAVAALLLPPGDVELEAVLVGLGPVREQVVSEGGDVLGRDGAGAAVVDPVLAVVDEQGAVEGGQLGGLGLGLGLGLAVGGLH

SEQ ID NO: 193 - protein, 134 aa, Cyanophage S-2L
  misc_feature: >New ORF = left: 15424 right: 15825 frame: -2 size(aa): 134
PIDPRGSARGPSPYKPLHHSTPVSLNTHAAVRLRQIATKLRGYTELQREAEILGMVAWRIDGLDKFIRRDNGSRDLHAVIRRVIHSTWEGGLPAMTQGFWDWTEKLRQTHLNYIRGQFKEKAIEERPRRPILDG

SEQ ID NO: 194 - protein, 65 aa, Cyanophage S-2L
  misc_feature: >New ORF = left: 15491 right: 15685 frame: 3 size(aa): 65
FRCVCRSFSVQSQKPWVMAGRPPSQVLWMTRRMTAWRSRLPLSRRMNLSRPSMRQATMPRISASL

SEQ ID NO: 195 - protein, 71 aa, Cyanophage S-2L
  misc_feature: >New ORF = left: 15543 right: 15755 frame: -1 size(aa): 71
VSTPTPPSGCVRSLPSCEDTPSFKERPRSWAWSPGASTASTNSSAETTAAGISMLSSAGSSTAPGRAACLP

SEQ ID NO: 196 - protein, 94 aa, Cyanophage S-2L
  misc_feature: >New ORF = left: 15725 right: 16006 frame: 3 size(aa): 94
RSLTAAWVLRLTGVEWWSGLYGEGPLAEPLGSIGQNGISSSPRTPVGAGAWDCHTGGWPVGTGAPAWSAAPTWAGVGCGAAGGAYGWPGEPPCP

SEQ ID NO: 197 - protein, 198 aa, Cyanophage S-2L
  misc_feature: >New ORF = left: 15753 right: 16346 frame: 1 size(aa): 198
DSRGWSGGVVCTGRGPLRSPWDRSVRTGFRPRPGRRSGPAPGTATPGAGRSAPGRLRGALRRPGPGSAAGRPEGRTAGPGSRLARRPGPPGPGPEREGLPGSPTAGSGGSTPAGAAARPVRVPGPGRAGASPTGRSGGSSRAGEGHRPGAPGAHGPGGPGPGAAAGAGRGTRSGAAGSGARCKACRCGSASSTRRCRA

SEQ ID NO: 198 - protein, 99 aa, Cyanophage S-2L
  misc_feature: >New ORF = left: 15759 right: 16055 frame: -1 size(aa): 99
PREPLPLRPRPRRPRPTGKAAPRASRTPLRPPRSRPRPRSAQRSTQAPRCRPASPRCGSPRRRPRPASWARTKSRSDRSIPGAPQGAPPRTNHSTTPPP

SEQ ID NO: 199 - protein, 257 aa, Cyanophage S-2L
  misc_feature: >New ORF = left: 15829 right: 16599 frame: -2 size(aa): 257
RVRPLSRTTTTPNRSLSMQAPYGQPQPQPQAQAPQLPALNGSLFVDDSQNRIDYSGSCTITAQDVAALADYLFSNRAEADQYGLKLYISGWKKQSRNGKPYISLQIQPPRNAFLGLPQQQRQAPAPQAHAPQAPPAGAPPQPYWNPQTGQWVTPQPAPAPAPAPAAQPPQPVWNPQTQQWVTPGAPPAQAPAPAAPAYGQGGSPGQPYAPPAAPQPTPAQVGAALHAGAPVPTGQPPVWQSQAPAPTGVLGEDEIPF

SEQ ID NO: 200 - protein, 146 aa, Cyanophage S-2L
  misc_feature: >New ORF = left: 16146 right: 16583 frame: -1 size(aa): 146
AGPRPHPTALFQCKPPTASPSPSPRPRPPSCPPSTAPCSSTTARTGSTTAAPAPSRPRTSPPSLTTCSRTGPRPTSTASSSTSPGGRSRAATASLTSRSRSSRPGTRSSACPSSSARPRPPRPMRPRRPRPVPLPSPTGTPRPASG

SEQ ID NO: 201 - protein, 111 aa, Cyanophage S-2L
  misc_feature: >New ORF = left: 16394 right: 16726 frame: -3 size(aa): 111
RPSRRRPSPRSTAGTRTTRSASAPPGRRPRARPRWPSSRAPLTRSASEPDHDHTQPLSFNASPLRPAPAPAPGPGPPAARPQRLPVRRRQPEPDRLQRLLHHHGPGRRRPR

SEQ ID NO: 202 - protein, 251 aa, Cyanophage S-2L
  misc_feature: >New ORF = left: 16485 right: 17237 frame: 1 size(aa): 251
GRAAGGPGPGAGAGAGRRGLALKESGWVWSWSGSEAERVSGALLDGQRGRALGRRPGGAEAERVVRVPAVLRGDGRRRLGRHAVLSVGRGHAEDGHHSVPAKVRDRGAQLLIGGVALGRLVEQDDRELRGDAGPGLVVEPGGEDGDPGLWAPVKGLDDRQPELVRLPDSLEDGAQVDVGAEAAVGGALDDAVLGLELGQRLEQERHPWVSGGHRGTRRWCSRRRARADPGRTAAGARRSPGGRSRWSLQRR

SEQ ID NO: 203 - protein, 55 aa, Cyanophage S-2L
  misc_feature: >New ORF = left: 16538 right: 16702 frame: 3 size(aa): 55
GACIERERLGVVVVRLRGRTRQRRPAGWPAGAGPGAAARRGRGRTRRSGPRCAAG

SEQ ID NO: 204 - protein, 88 aa, Cyanophage S-2L
  misc_feature: >New ORF = left: 16552 right: 16815 frame: 2 size(aa): 88
KRAVGCGRGPAQRPNASAAPCWMASGGGPWGGGPEGPRPNASFGSPLCCGVMAAVGWGVMLSSVSAEAMPRMAITAYRRRYVIVAPSC

SEQ ID NO: 205 - protein, 212 aa, Cyanophage S-2L
  misc_feature: >New ORF = left: 16587 right: 17222 frame: -1 size(aa): 212
PTRSASRRSPSTCSSTARISPGPPTRTPSSSSPMTSADPRMPLLLKALAQFQAEHSVVERTADGSFGPYVDLSAVLKAVREANKLGLSIVQTFDRGPEPGVAVLSTWLYHESGACVSSELPVVLFYEPTKRNTSNQQLGATITYLRRYAVMAILGMASADTEDSMTPQPTAAITPQHSGDPNDAFGLGPSGPPPQGPPPLAIQQGAADAFGL

SEQ ID NO: 206 - protein, 67 aa, Cyanophage S-2L
  misc_feature: >New ORF = left: 16741 right: 16941 frame: -2 size(aa): 67
PGPRARGRRPLHLALPRVRGLRLLGAPGRPVLRADQAQHLQSAAGRHDHVPSPVRCDGHPRHGLGRH

SEQ ID NO: 207 - protein, 77 aa, Cyanophage S-2L
  misc_feature: >New ORF = left: 16775 right: 17005 frame: -3 size(aa): 77
APSSRLSGRRTSSGCRSSRPLTGAQSPGSPSSPPGSTTSPGPASPRSSRSSCSTSRPSATPPISSWAPRSRTFAGTL

SEQ ID NO: 208 - protein, 65 aa, Cyanophage S-2L
  misc_feature: >New ORF = left: 16799 right: 16993 frame: 3 size(aa): 65
SWRPAADWRCCAWSARRTGRPGAPRRRRPRTRGRARWRGRRPRALGPGQRSGRSTARACSPPGQP

SEQ ID NO: 209 - protein, 55 aa, Cyanophage S-2L
  misc_feature: >New ORF = left: 16945 right: 17109 frame: -2 size(aa): 55
PTDAAPAQGAGPVPGRAQRRRAHRRRQLRPLRRPERRPQGCPGGEQARAVDRPDL

SEQ ID NO: 210 - protein, 190 aa, Cyanophage S-2L
  misc_feature: >New ORF = left: 17020 right: 17589 frame: 2 size(aa): 190
GPKLPSAVRSTTLCSAWNWASALSRSGIRGSAEVIGELDDGVLVGGPGLILAVLLQVLGDLLEADLVGHCSGVDGIVREPDDPGGVGRLRLEQHQQLPLGRTAGQAEDLEVVGRLMIVAVVPDRPLELAIAGVGRGLDVDQPPGAGPRVEPDLELQARGRVDREDRLLGGDHRLGDALNDGVLEGDVPHG

SEQ ID NO: 211 - protein, 347 aa, Cyanophage S-2L
  misc_feature: >New ORF = left: 17113 right: 18153 frame: -2 size(aa): 347
SLYRGREPPQSHNNRGPFSRDLPPLAPRMALLPWPSARHPYCYLPARWDPGAYDPGVPGPVPGDPMTQAPQAPEPTPEELQPQPPKLTNEQHHAHPAIGSSDLKLFRRSPLHYWHRKYSPSFVPKPPSASMQMGTALHIALLEPERFEKAVGQALTTPKTSKAAKEAHAEHDAKYELTIPPAAYQQVLAMRDVALKHPVIKRIAETVVSTEESVFAIDPTTGLELKIRLDAWTSPGWLIDVKTTADASNGKFKWSIRDYGYDHQAAYYLKVLRLAGRPPQGQLLVLLESEAPHAARVVRLPDDAINAAAVTNEICLQEIAEHLQQYGQDQPWPAYENTIVEFPYDLR

SEQ ID NO: 212 - protein, 143 aa, Cyanophage S-2L
  misc_feature: >New ORF = left: 17123 right: 17551 frame: -3 size(aa): 143
AHRRDGGLHRGVGLRDRPDHGPGAQDPARRVDQPRVADRRQDHGRRQQWQVQVVDPGLRLRSSGGLLPQGPPPGRPSAPGAVAGAARVGGAPRRPGRPAPGRCHQRRCSDQRDLPPGDRRAPAAVRPGSALARLREHHRRVPL

SEQ ID NO: 213 - protein, 61 aa, Cyanophage S-2L
  misc_feature: >New ORF = left: 17168 right: 17350 frame: 3 size(aa): 61
SWPYCCRCSAISWRQISLVTAAALMASSGSRTTRAAWGASDSSSTSNCPWGGRPARRRTLR

SEQ ID NO: 214 - protein, 71 aa, Cyanophage S-2L
  misc_feature: >New ORF = left: 17226 right: 17438 frame: -1 size(aa): 71
STSRPRPTPAMASSSGRSGTTATIIRRPTTSRSSAWPAVRPRGSCWCCSSRRRPTPPGSSGSRTMPSTPLQ

SEQ ID NO: 215 - protein, 74 aa, Cyanophage S-2L
  misc_feature: >New ORF = left: 17381 right: 17602 frame: 3 size(aa): 74
SRIDHLNLPLLASAVVLTSISHPGLVHASSRILSSRPVVGSIAKTDSSVETTVSAMRLMTGCLRATSRMANTCW

SEQ ID NO: 216 - protein, 231 aa, Cyanophage S-2L
  misc_feature: >New ORF = left: 17555 right: 18247 frame: -3 size(aa): 231
WSGSGRRPGPGTGGRPYSQRAVLWRASRHVIVVVPGAGAPTIPQQPWTFLKRPTASGTSDGASTVALGAAPVLLSPRKVGPRCLRPRSSGTCAGRPDDPGTPGPGAHPGGAPAPAPQAHQRAAPRPPRDRIERPQALPPVAAPLLAPQVQPLVRTEAALGLDADGDRPAHRPARAGALREGGRSGADDAQDVEGGQGGPRRARRQVRAHDPPGGLPAGVSHAGRRPQAPRH

SEQ ID NO: 217 - protein, 155 aa, Cyanophage S-2L
  misc_feature: >New ORF = left: 17593 right: 18057 frame: 2 size(aa): 155
HLLVGRRGDRELVLGVVLGVGLLGRLRRLGRRQRLTDRLLEALRLEQGDVQGGPHLHRGRGRLRYERGAVLAVPVVERRPAEELEVARSDRGVGVVLLVGELGGLGLELLRGGLRGLGCLGHRVARHRSRNSWVVSTWVPPCGEIAVRVPRRGPR

SEQ ID NO: 218 - protein, 73 aa, Cyanophage S-2L
  misc_feature: >New ORF = left: 17625 right: 17843 frame: 1 size(aa): 73
ARTWRRARRGPPWPPSTSWASSAPDRPPSRSAPARAGRCAGRSPSASRPRAASVRTRGCTCGASSGAATGGRA

SEQ ID NO: 219 - protein, 88 aa, Cyanophage S-2L
  misc_feature: >New ORF = left: 17691 right: 17954 frame: -1 size(aa): 88
PRHPRPRSPPRRSSSPSPPSSPTSSTTPTPRSDRATSSSSAGRRSTTGTASTAPRSYRSRPRPRCRWGPPCTSPCSSRSASRRRSVRR

SEQ ID NO: 220 - protein, 59 aa, Cyanophage S-2L
  misc_feature: >New ORF = left: 17819 right: 17995 frame: 3 size(aa): 59
WSGDRRKSLRSLDPIAGWAWCCSLVSLGGWGWSSSGVGSGAWGAWVIGSPGTGPGTPGS

SEQ ID NO: 221 - protein, 101 aa, Cyanophage S-2L
  misc_feature: >New ORF = left: 17895 right: 18197 frame: 1 size(aa): 101
AWGAGAGAPPGWAPGPGVPGSSGRPAQVPELLGRKHLGPTLRGDSSTGAAPRATVEAPSEVPEAVGLLRKVHGCCGIVGAPAPGTTTITCRLARHNTARCE

SEQ ID NO: 222 - protein, 70 aa, Cyanophage S-2L
  misc_feature: >New ORF = left: 17958 right: 18167 frame: -1 size(aa): 70
PACYSRCTGGGSPHNPTTTVDLSQETYRLWHLGWRFYRGPRRGTRTAISPQGGTQVLTTQEFRDLCRATR

SEQ ID NO: 223 - protein, 113 aa, Cyanophage S-2L
  misc_feature: >New ORF = left: 18029 right: 18367 frame: 3 size(aa): 113
QYGCRAEGHGRSAIRGARGGRSLEKGPRLLWDCGGSRPRYNDYNMPASPPQYCPLRVGPSTGPGPRPPARPGPSVRPRPSSCARRRWRFAQPAGRRTGAGAPPRGGPTARAFP

SEQ ID NO: 224 - protein, 103 aa, Cyanophage S-2L
  misc_feature: >New ORF = left: 18157 right: 18465 frame: -2 size(aa): 103
MAPQTAVPRPQPAGCLRGQLLERVGHPPGLGAQGNARAVGPPRGGAPAPVLRPAGWANRHRLRAQLLGRGRTDGPGRAGGLGPGPVEGPTRSGQYCGGLAGML

SEQ ID NO: 225 - protein, 105 aa, Cyanophage S-2L
  misc_feature: >New ORF = left: 18171 right: 18485 frame: -1 size(aa): 105
DRAMRNEWPLKQLSPVHNQLGVFEASCWSESDIPPDWELKGTLVRSGLPGEVHRHRFYDLRAGRIAIVFEHSCLGEDALMVRVGPAAWARDRWKALLAAGSIVAG

SEQ ID NO: 226 - protein, 183 aa, Cyanophage S-2L
  misc_feature: >New ORF = left: 18201 right: 18749 frame: 1 size(aa): 183
GLPPVPGPGRRPDPDHQCVLAQAAVLEDDGDSPSPQVVEPVPVHLPGEARPHERSLELPVRGDVRLAPAAGLEDTQLVVDGGQLFEGPFIPHSPILPPWGGGRRRSPSGCGAGPDGRPSSCAVSCAGCLACRPRSASARSAPAPGPPWGPGRPGSPTPGPGSGRSAGQPASGSTRSRYPCSGG

SEQ ID NO: 227 - protein, 166 aa, Cyanophage S-2L
  misc_feature: >New ORF = left: 18251 right: 18748 frame: -3 size(aa): 166
PPEHGYLDLVDPDAGWPADRPEPGPGVGDPGRPGPQGGPGAGADRADADLGRQARHPAQDTAQLDGRPSGPAPQPLGDRRRPPPHGGRIGLCGMNGPSNSCPPSTTSWVSSRPAAGASRTSPRTGSSRERSCGRASPGRCTGTGSTTCGLGESPSSSSTAAWARTH

SEQ ID NO: 228 - protein, 507 aa, Cyanophage S-2L
  misc_feature: >New ORF = left: 18316 right: 19836 frame: 2 size(aa): 507
NRCRCTSPGRPDRTSVPLSSQSGGMSDSLQQLASKTPSWLWTGDSCLRGHSFRIALSYHRGVGAGDDLPAVAEPDLMAGHPVVQCLARDASPVAPGQHPLDRHPHRGRPGGQDVPDHPHRGLAPVDPLANPRLDPPDPDTHVPAASHPDQFSGRQPGQGAVEGGPGQVELCGHLGQRRPPPGPMVGQAAPGQRHHRGPPGPMASEQFRLNRQGMLGWVHATLHRSGAAVDRRPGVDAQGQQARALRPPHRGRQDQHLHRGGQADRGAGQAGPDPGAPPGAPPPDQRPAHEVGHHPRAEPGRVRLDDRQADPLPAGPADRRRGPPLRQPHLGPEDRRVRRPAPGLDRHPGAARRPGPGRGVPGHGHRAVRRRAHGAQPPVPVPPVPPAPGLRPGQRAGRVLRGPQLEDVRRRPADDRVLHLDRACGQDLRGVPGRRCGGRGARLETVRHRAARADRPVQERRDDGARLGHADLGGFRRPRLRLRPAAPPDVVAVALPPAGRPGPPVLR

SEQ ID NO: 229 - protein, 158 aa, Cyanophage S-2L
  misc_feature: >New ORF = left: 18484 right: 18957 frame: -2 size(aa): 158
HTLPIQPELLARHRSRWSPVVSLTWSRLADHGPGWWPSLTEMAAEFDLPRATFYRALARLASAELIGMTSRRNMGIWIWWIQTRVGQRIDRSQAPVWVIRDVLAPRAAPVRVPIERMLTWGDRRGIPRKTLHNWMAGHQVRLRNRWEIVAGPHPTVVG

SEQ ID NO: 230 - protein, 84 aa, Cyanophage S-2L
  misc_feature: >New ORF = left: 18545 right: 18796 frame: 3 size(aa): 84
WPAIQLCSVLRGMPRLSPQVSIRSIGTRTGAALGARTSRITHTGAWLRSIRWPTRVWIHQIQIPMFRRLVIPISSADASRARAR

SEQ ID NO: 231 - protein, 83 aa, Cyanophage S-2L
  misc_feature: >New ORF = left: 18753 right: 19001 frame: 1 size(aa): 83
SSRSVQRTPAGPGRGRRWPWAGRTLRPSRSATATTRAHGRPGGSRSATPPGTTGTDGERAIQAESARYARMGACHSTPIRSSC

SEQ ID NO: 232 - protein, 55 aa, Cyanophage S-2L
  misc_feature: >New ORF = left: 18770 right: 18934 frame: -3 size(aa): 55
IARSPSVPVVPGGVADLEPPGRPWARVVAVADRDGRRVRPAQGHLLPRPGPAGVR

SEQ ID NO: 233 - protein, 461 aa, Cyanophage S-2L
  misc_feature: >New ORF = left: 18938 right: 20320 frame: -3 size(aa): 461
DHVGSHGLGHLQANPVLEDGFALCHTTILAPRITGGQDLVYPAWFVPLLLGQPAQVLLGPGVPDDLPLGHGVDRGGGGLLEDGIHLPGYDGLHRVPVPAERADRRRAVDLEALRADPERWGRAVLAGPDLLALQGPVVEVVRQAQVRVLRVAHAVEDDAGLTGEPEAPADLLEVERQRRRRAEQQDAVAVGDVETLRDQHDRDEHHRLAALEPGDPLEPLGVGQFRVEHLGRHTDGPERLAGLGRMLDRDAERDRPPAVGERLPVADPGEHGPLAARVEVRGRVEQAVPGQAVERHELGDGRPDDHVLEHLAQAPAVEPLRGGGPAQERDVVLVDLPGPGGADAVVGLVDDQQVRPEVGPLADRRDVHAPVRPGGDARLHEPDVGLVEELPAVHQDQGPLAPLHGPPGRLDEGVGLAAPGGEDAEHALVALEHRRPGVGQQLLLIGVEWHAPILAYLADSA

SEQ ID NO: 234 - protein, 424 aa, Cyanophage S-2L
  misc_feature: >New ORF = left: 18962 right: 20233 frame: 3 size(aa): 424
DGCMPLYTDQEQLLTDARASMLKGNKRVLCVLPTGGGKTNTFIEAARRTVERGKRALILVHRRELLHQTNVRLMKSGITPGPNRGVYVSTIGKRTHFRPDLLIVDEAHHCVSPTWARKIDEYDVPLLGWTATPERLDGRGLGEVFQDMVIGPSVAELMALNRLSRYRLFHPPPDFDPGSERAVFSGVRNWKTFADGRRTIAFCISIEHAAKTCEAFRAVGVAAEVLDSKLSDTERLERIARFKSGETMVLVSVMLISEGFDVPDCDCVLLLRPTSSLSLYLQQVGRGLRFSGEPCVILDCVGNSQHPNLGLPDDFHHWSLEGKKVRAGQDGTAPPLRVCPKCFQVHRPAPVCPFCGYRHPVQSVVPREVDAVLQESTATPIHTVPKREVIRNARTEEDLRRLAQEQGYKPGWVDKILAARNARR

SEQ ID NO: 235 - protein, 269 aa, Cyanophage S-2L
  misc_feature: >New ORF = left: 18991 right: 19797 frame: -2 size(aa): 269
SDSDDVGRSSRTQSQSGTSKPSEISMTETSTIVSPLLNRAIRSSRSVSDSFESSTSAATPTARNASQVLAACSIEMQNAIVRRPSANVFQLRTPENTARSLPGSKSGGGWNRRYRDRRLSAMSSATDGPMTMSWNTSPRPRPSSRSGVAVQPRSGTSYSSIFRAQVGLTQWWASSTISRSGRKWVRLPIVETYTPRFGPGVMPDFMSRTLVWWRSSRRCTRIRARLPRSTVRLAASMKVLVLPPPVGRTQSTRLLPLSIDARASVNSCS

SEQ ID NO: 236 - protein, 152 aa, Cyanophage S-2L
  misc_feature: >New ORF = left: 19269 right: 19724 frame: 1 size(aa): 152
SSTRPTTASAPPGPGRSTSTTSRSWAGPPPRSGSTAGAWARCSRTWSSGRPSPSSWRSTACPGTACSTRPRTSTRAASGPCSPGSATGRRSPTAGGRSRSASRSSMRPRPARRSGPSVWRPRCSTRNCPTPSGSSGSPGSRAARRWCSSRSC

SEQ ID NO: 237 - protein, 81 aa, Cyanophage S-2L
  misc_feature: >New ORF = left: 19443 right: 19685 frame: -1 size(aa): 81
TGRSARAARCRTVSSRAPRPPHRRPGTPRRSWPHARSRCRTRSSAGRRRTSSSCGPRRTRPARCPGRSPGAGGTGGTGTGG

SEQ ID NO: 238 - protein, 157 aa, Cyanophage S-2L
  misc_feature: >New ORF = left: 19728 right: 20198 frame: 1 size(aa): 157
SRRVSTSPTATASCCSARRRRCRSTSSRSAGASGSPVSPASSSTAWATRSTRTWACRTTSTTGPWRARRSGPARTARPHRSGSARSASRSTARRRSARSAGTGTRCSPSYPGRWMPSSRSPPPPRSTPCPSGRSSGTPGPRRTCAGWPRSRGTNQAG

SEQ ID NO: 239 - protein, 144 aa, Cyanophage S-2L
  misc_feature: >New ORF = left: 19801 right: 20232 frame: -2 size(aa): 144
RRALRAARILSTQPGLYPCSWASRRRSSSVRAFRMTSRLGTVWIGVAVDSWRTASTSRGTTDCTGCRYPQNGQTGAGRWTWKHFGQTRSGGAVPSWPARTFLPSRDQWWKSSGRPRFGCCELPTQSRMTQGSPENRRPRPTCWR

SEQ ID NO: 240 - protein, 127 aa, Cyanophage S-2L
  misc_feature: >New ORF = left: 19840 right: 20220 frame: 2 size(aa): 127
ALRHPRLRGQLAAPEPGPAGRLPPLVPGGQEGPGRPGRHGPTAPGLPEVLPGPPPGAGLPVLRVPAPGAVRRTPGGGCRPPGVHRHPDPHRAQAGGHPERPDRGGPAPAGPGAGVQTRLGRQDPGRP

SEQ ID NO: 241 - protein, 92 aa, Cyanophage S-2L
  misc_feature: >New ORF = left: 19851 right: 20126 frame: -1 size(aa): 92
PPAWARCGSGWRWTPGGRHPPPGVRRTAPGAGTRRTGRPAPGGGPGSTSGRPGAVGPCRPGRPGPSCPPGTSGGSRPAGPGSGAASCPRSRG

SEQ ID NO: 242 - protein, 81 aa, Cyanophage S-2L
  misc_feature: >New ORF = left: 20130 right: 20372 frame: -1 size(aa): 81
SSPRSEDRGGSHCGSGIGPRGEPWPGPPPGESSFGGWFRAVPYNHTSAAHYGRPGSCLPSLVCTPAPGPAGAGPPRSGRSG

SEQ ID NO: 243 - protein, 68 aa, Cyanophage S-2L
  misc_feature: >New ORF = left: 20202 right: 20405 frame: 1 size(aa): 68
TRSWPPVMRGASMVVWHSAKPSSKTGFAWRWPRPWLPTWSYSGTTMGASPILGPGAGSPSAWGRAPPT

SEQ ID NO: 244 - protein, 201 aa, Cyanophage S-2L
  misc_feature: >New ORF = left: 20224 right: 20826 frame: 2 size(aa): 201
CAALVWLYGTARNHPPKLDSPGGGPGHGSPRGPIPEPQWEPPRSSDRGLDHLRPGGGLPRPDRMARPPDRRPRPVRRSRGQAARGEGPPRAADLDRQHQRGRRPCRYRHFTRGGHRSPVQSPLSLRGTPCPPQPQRPPPARPAPGSPASSQSCSTCPRPSSSASIGRRTRTGGPVRLRSSTCSRPPSTPARSADRTTGPVQ

SEQ ID NO: 245 - protein, 118 aa, Cyanophage S-2L
  misc_feature: >New ORF = left: 20236 right: 20589 frame: -2 size(aa): 118
GGLDRRAMASSGEVTVPARPPAALMLSIQVCCSGRAFSPGSLTSRPTNWARAPIWRTRHPIRSGEPSPRPKVIQPPVRGSGRLPLWFRNRTTWGAMAWATSRRIQFWRMVSRCAIQPY

SEQ ID NO: 246 - protein, 172 aa, Cyanophage S-2L
  misc_feature: >New ORF = left: 20237 right: 20752 frame: 3 size(aa): 172
YGCMAQRETILQNWIRLEVAQAMAPHVVLFRNHNGSLPDPRTGGWITFGLGEGSPDLIGWRVLQIGALAQFVGLEVKLPGEKARPEQQTWIDNINAAGGLAGTVTSPEEAIALLSSPPYPFEVHHAPRNRRGPRPQDPLPEARPQASPALHARGPRRAPRSGEGPGPADPFG

SEQ ID NO: 247 - protein, 76 aa, Cyanophage S-2L
  misc_feature: >New ORF = left: 20324 right: 20551 frame: -3 size(aa): 76
SDGTGKAAGRVDVVDPGLLLGAGLLPGQLDLETDELGEGADLEDAPSDQVGGALPQAEGDPAPGPRIGEAPIVVPE

SEQ ID NO: 248 - protein, 131 aa, Cyanophage S-2L
  misc_feature: >New ORF = left: 20409 right: 20801 frame: 1 size(aa): 131
SDGASSRSAPSPSSSVSRSSCPGRRPAPSSRPGSTTSTRPAALPVPSLHPRRPSLSCPVPPIPSRYTMPPATAEAPARKTRSRKPGLKPVLLYMPEALVERLDRAKDQDRRTRSAEIFHLLEAALDARSIG

SEQ ID NO: 249 - protein, 116 aa, Cyanophage S-2L
  misc_feature: >New ORF = left: 20550 right: 20897 frame: -1 size(aa): 116
GYDRCGRRSCSVEAPREQSWGASHCTGPVVRSADRAGVEGGLEQVEDLSRTGPPVLVLRPIEALDEGLGHVEQDWLEAGLPGAGLAGGGLCGCGGHGVPRRDRGDWTGERWPPRVK

SEQ ID NO: 250 - protein, 63 aa, Cyanophage S-2L
  misc_feature: >New ORF = left: 20671 right: 20859 frame: -2 size(aa): 63
GPPGAILGGLSLYGARGSISRSSGRRGRPRAGGRSQPNGSAGPGPSPDRGARRGPRACRAGLA

SEQ ID NO: 251 - protein, 76 aa, Cyanophage S-2L
  misc_feature: >New ORF = left: 20687 right: 20914 frame: -3 size(aa): 76
CLRWSKGMTAVAGGHAVLRPPGSNPGGPLTVRGPWFDQPIERASRAASSRWKISAERVRRSWSFARSRRSTRASGM

SEQ ID NO: 252 - protein, 54 aa, Cyanophage S-2L
  misc_feature: >New ORF = left: 20756 right: 20917 frame: 3 size(aa): 54
DLPPARGRPRRPLDRLIEPRAPYSERPPRIAPGGPQHCMTACHSGHTLTPPQTL

SEQ ID NO: 253 - protein, 274 aa, Cyanophage S-2L
  misc_feature: >New ORF = left: 20830 right: 21651 frame: 2 size(aa): 274
EAPQDCSRGASTLHDRLPQRSYPYSTSDTIADVNPRTSLRPGPDPPPPVAPPEGHRHDPVPGDLAQARGQGKSLDDAPDRGHGPGRRHPGIQQLHRRRRRRRLRRRDHQCQRHLRRVGRRRPGLAGRRLGGLRPAAAELPAAHRGQVDPPLLGVPQPCGRPGLDRAPGPPDRPGRLRHDEPEPLPGDAPGRLPPPAHRGGGPDLQRDRGALRPRADAAGPAPGADRPAGCRPGGPGRCPQFDGRHPGRPGPDPTPSRGRERHLRRVPQHPLGPG

SEQ ID NO: 254 - protein, 56 aa, Cyanophage S-2L
  misc_feature: >New ORF = left: 20874 right: 21041 frame: 1 size(aa): 56
PPATAVIPLLHLRHYSRCQPPHQPSTGTRSSSTCRSSGRTSPRPGTGRSGPGERTR

SEQ ID NO: 255 - protein, 63 aa, Cyanophage S-2L
  misc_feature: >New ORF = left: 20901 right: 21089 frame: -1 size(aa): 63
RRPGPWPRSGASSRLLPCPLAWARSPGTGSWRCPSGGATGGGGSGPGRRLVRGLTSAIVSEVE

SEQ ID NO: 256 - protein, 66 aa, Cyanophage S-2L
  misc_feature: >New ORF = left: 20911 right: 21108 frame: -2 size(aa): 66
LLNPWVTASWTVAPVRGVVQAFTLSSRLGQIARYRVVAMSFRRSDRWRRIWSRSKAGAGVDICYSV

SEQ ID NO: 257 - protein, 738 aa, Cyanophage S-2L
  misc_feature: >New ORF = left: 20921 right: 23134 frame: 3 size(aa): 738
QMSTPAPAFDRDQILLHLSLLRKDIATTRYRAIWPRREDKVKAWTTPLTGATVQDAVTQGFNSYIVVGDGGDSDAEITSVNAIFGEWDDGDLAWQVGAWEACGLPRPSFQLRTGGKSIHHYWVFHSPVDVPAWTELQARLIALAGFDTTNRNPSRVMRLAGCPHQRTGEVAQIFNATGELYDPGQMLQVLPPVPIDPPAAAPVAPGGAPSSMDDIRAALAQIPPRPGAGSGTYAEYRNILWGLVKAVEEAGGTRDQAVAMMQAHSPEGWDCAQVARSGGKKISTGTFWWHAMSYGWAPPKKAPEPPPQARQVPAVAAVLQAAEAAPGTGTEHGPWAPLPPGWQGTNKEGLPRASQITTYELALLMQVSLRGVLWHNEMSGEVMHGKTALSPIELQIAYSRLEGLGYKVTKENAKTAILQASIADLRHPVREYLNTCTTPLPDEVWADIANALLGPGHSAFDSSAIRKWLIFAVARVFQPGCPFGFMLVLAGAQQMHKTRFFNTLASDEWFLGGFQRGRSDTDDLIALHRSWITEWGELDGGLSKHDSAELKAMIDRKVDVLRRPYAATHESCPRSFVLCGTTNRRDGLFTDPTGNRRYVVVPVNQRIDSERLEQMRDQIWATALREYRSGKLWYLDEEELEINAKRNKGLEVEDAWVGTIQMHLNSSIDLERLTDGRYGINIESVYLKIEPEVGRRGPGFGKRIRDTMLSLGWEPVRLRLASDPSGNPVRRWAPVQGG

SEQ ID NO: 258 - protein, 375 aa, Cyanophage S-2L
  misc_feature: >New ORF = left: 20930 right: 22054 frame: -3 size(aa): 375
HLVVPEHPPQGDLHQQGQFVGGDLRGPGQALLVRALPARGQRRPGAVLGAGSRGGLCGLEHGGHGRHLAGLGRRLRGLLRRCPAVGHRMPPERPGADLLAPGAGHLGAIPALGAVRLHHGHGLVPGAAGLLDGLNQAPEDVAVLGVGAAPCPGTGWDLGQGGPDVVHRTGGTSRGHRGGSRRVDRHRGQDLQHLPGVVELPGRVEDLGHLPGALVGAAGQAHHPGGVPVRRVEAGQGDQAGLELGPGRDVHRAVEHPVVVDRLAPGAQLEARPRQAAGLPGADLPGQVAVVPLAEDGVDTGDLGVGVAAVAYDDVAVESLGDGVLDRGPGQGRRPGFYLVLSPGPDRPVPGRGDVLPEERQVEEDLVPVEGWCGG

SEQ ID NO: 259 - protein, 56 aa, Cyanophage S-2L
  misc_feature: >New ORF = left: 21112 right: 21279 frame: -2 size(aa): 56
WWIDLPPVRSWKLGRGRPQASQAPTCQARSPSSHSPKMALTLVISASESPPSPTTM

SEQ ID NO: 260 - protein, 72 aa, Cyanophage S-2L
  misc_feature: >New ORF = left: 21123 right: 21338 frame: 1 size(aa): 72
ATAATPTPRSPVSTPSSASGTTATWPGRSAPGRPAACRGRASSCAPGASRSTTTGCSTALWTSRPGPSSRPA

SEQ ID NO: 261 - protein, 93 aa, Cyanophage S-2L
  misc_feature: >New ORF = left: 21162 right: 21440 frame: -1 size(aa): 93
RSGPPPRCAGGGSRPGASPGRGSGSSCRSRPGRSGGPGARSRPGRPQGCGTPSSGGSTCPRCAAGSSAAAGRRPPRRRPARPGRRRPTRRRWR

SEQ ID NO: 262 - protein, 59 aa, Cyanophage S-2L
  misc_feature: >New ORF = left: 21283 right: 21459 frame: -2 size(aa): 59
SSPVALKIWATSPVRWWGQPARRITREGFRFVVSKPARAIRRAWSSVQAGTSTGLWNTQ

SEQ ID NO: 263 - protein, 103 aa, Cyanophage S-2L
  misc_feature: >New ORF = left: 21390 right: 21698 frame: 1 size(aa): 103
CAWPAAPTSAPGRWPRSSTRPGSSTTPGRCCRSCPRCRSTRRLPPRWPREVPPVRWTTSGPPWPRSHPVPGQGAAPTPSTATSSGAWLRPSRRPAAPGTRPWP

SEQ ID NO: 264 - protein, 69 aa, Cyanophage S-2L
  misc_feature: >New ORF = left: 21444 right: 21650 frame: -1 size(aa): 69
PGPRGCCGTRRRCRSLPRDGVGSGPGRPGCRPSNWGHLPGPPGRQPAGRSAPGAGPAASARGRRAPRSR

SEQ ID NO: 265 - protein, 51 aa, Cyanophage S-2L
  misc_feature: >New ORF = left: 21463 right: 21615 frame: -2 size(aa): 51
VPLPAPGRGGIWARAARMSSIELGAPPGATGAAAGGSIGTGGRTCSICPGS

SEQ ID NO: 266 - protein, 60 aa, Cyanophage S-2L
  misc_feature: >New ORF = left: 21619 right: 21798 frame: -2 size(aa): 60
DIACHQNVPVLIFLPPERATWAQSQPSGLCACIMATAWSRVPPASSTALTRPQRMLRYSA

SEQ ID NO: 267 - protein, 256 aa, Cyanophage S-2L
  misc_feature: >New ORF = left: 21655 right: 22422 frame: 2 size(aa): 256
GRRGGRRHPGPGRGHDAGAQPRGLGLRPGGPLRGQEDQHRDVLVACDVLRLGTAEEGPGAAAPGPPGAGRGRRAPGRRGRPWNRHRARPLGAAAPGLAGHEQGGPAQGLADHHLRTGPADAGLPAGGALAQRDVRRSHARQDGPLADRAPDRLQPARGPRLQGHQGERQDRHPAGVDRRPAAPRPGVPQHLHDAPARRGLGRHRQRPAGPRAQRVRLQRHPQVADLRRGPGLPARLPLRLHAGAGWRPADAQDPVL

SEQ ID NO: 268 - protein, 103 aa, Cyanophage S-2L
  misc_feature: >New ORF = left: 21702 right: 22010 frame: 1 size(aa): 103
CRRTAPRAGIAPRWPAPGARRSAPGRSGGMRCPTAGHRRRRPRSRRPRPARCRPWPPCSRPQRPPLEPAPSTAPGRRCPRAGRARTRRACPGPRRSPPTNWPC

SEQ ID NO: 269 - protein, 73 aa, Cyanophage S-2L
  misc_feature: >New ORF = left: 21768 right: 21986 frame: -1 size(aa): 73
SARPWAGPPCSCPASPGAAAPRGRARCRFQGRPLRPGARRPRPAPGGPGAAAPGPSSAVPSRRTSHATRTSRC

SEQ ID NO: 270 - protein, 64 aa, Cyanophage S-2L
  misc_feature: >New ORF = left: 21802 right: 21993 frame: -2 size(aa): 64
VVICEALGRPSLFVPCQPGGSGAQGPCSVPVPGAASAAWSTAATAGTWRAWGGGSGAFFGGAQP

SEQ ID NO: 271 - protein, 104 aa, Cyanophage S-2L
  misc_feature: >New ORF = left: 22014 right: 22325 frame: 1 size(aa): 104
CRSPCGGCSGTTRCQAKSCTARRPSRRSSSRSPTAGSRASATRSPRRTPRPPSCRRRSPTCGTPSGSTSTPARRPCPTRSGPTSPTPCWAPGTARSTPAPSASG

SEQ ID NO: 272 - protein, 126 aa, Cyanophage S-2L
  misc_feature: >New ORF = left: 22058 right: 22435 frame: -3 size(aa): 126
GQGVKEPGLVHLLGASQHQHEAEGAAGLEDPGHGEDQPLADGAGVERAVPGAQQGVGDVGPDLVGQGRRAGVEVLPDGVPQVGDRRLQDGGLGVLLGDLVAEALEPAVGDLELDRREGRLAVHDFA

SEQ ID NO: 273 - protein, 158 aa, Cyanophage S-2L
  misc_feature: >New ORF = left: 22138 right: 22611 frame: -2 size(aa): 158
GLRSTSTFRSIIALSSALSCLERPPSSSPHSVIQDRCRAIRSSVSERPRWNPPRNHSSEARVLKNRVLCICWAPASTSMKPKGQPGWKTRATAKISHLRMALESNALCPGPSRALAMSAQTSSGRGVVQVLRYSRTGCRRSAIDACRMAVLAFSLVTL

SEQ ID NO: 274 - protein, 51 aa, Cyanophage S-2L
  misc_feature: >New ORF = left: 22221 right: 22373 frame: -1 size(aa): 51
SRRGSRAGRPGPRRRSATCGWRWSRTRCARGPAGRWRCRPRPRRAGASCRC

SEQ ID NO: 275 - protein, 54 aa, Cyanophage S-2L
  misc_feature: >New ORF = left: 22329 right: 22490 frame: 1 size(aa): 54
SSPWPGSSSPAAPSASCWCWLAPSRCTRPGSLTPWPQTSGSWADSSGAALTPTT

SEQ ID NO: 276 - protein, 177 aa, Cyanophage S-2L
  misc_feature: >New ORF = left: 22439 right: 22969 frame: -3 size(aa): 177
LDVDAVAPVGQPLQVDRAIQVHLDRPHPGVLHLKALVAFRVDLQLLLVEVPELAAAVLPEGGCPDLVSHLLQALAVDPLVDGHDHVPPVAGRVGEEPIPAVRRPAEDEAPGAAFVRGGVGPPEHVHLPVDHRLELGAVVLGEAAVELPPLGDPGPVQGNQVVGVRAAPLESAQEPLV

SEQ ID NO: 277 - protein, 130 aa, Cyanophage S-2L
  misc_feature: >New ORF = left: 22480 right: 22869 frame: 2 size(aa): 130
HRRPDCPAPVLDHRVGGARRRPLQARQRRAQGDDRPEGGRAPEALRRHARKLPPELRPLRDDEPPGWALHRPDRQQAVRGRARQPADRQRAPGADARPDLGNRPPGVPQRQALVPRRGGAGDQRETQQGP

SEQ ID NO: 278 - protein, 110 aa, Cyanophage S-2L
  misc_feature: >New ORF = left: 22581 right: 22910 frame: 1 size(aa): 110
STGRWTCSGGPTPPRTKAAPGASSSAGRRTAGMGSSPTRPATGGTWSCPSTSGSTASAWSRCETRSGQPPSGSTAAASSGTSTRRSWRSTRNATRALRWRTPGWGRSRCT

SEQ ID NO: 279 - protein, 112 aa, Cyanophage S-2L
  misc_feature: >New ORF = left: 22615 right: 22950 frame: -2 size(aa): 112
RPSVSRSRSIELFRCIWIVPTQASSTSRPLLRFALISSSSSSRYQSLPLRYSRRAVAQIWSRICSRRSLSIRWLTGTTTYRLLPVGSVKSPSRRFVVPQRTKLRGQLSCVAA

SEQ ID NO: 280 - protein, 134 aa, Cyanophage S-2L
  misc_feature: >New ORF = left: 22918 right: 23319 frame: 2 size(aa): 134
LDRPGAADRRALRHQHRVSLPQDRARGGTPWPGLRKADPGHHAEPGLGARAAASRQRPERQPGEALGARPGGVAQGMVGTVAQGDTVRATVPGRAGGVREGLAPRICPSHGPIPPVVLLCHPPPRRERKKGGQE

SEQ ID NO: 281 - protein, 105 aa, Cyanophage S-2L
  misc_feature: >New ORF = left: 22973 right: 23287 frame: -3 size(aa): 105
GGGGTTAQQGESGRGTGRFEVPTPPGPPRHGPAQWHGLCRPVPPFRPSPVLPPLDGRPTPHRVAARVAGETQPHGLPAQAQHGVPDPLSEARATASHLGLDLEVD

SEQ ID NO: 282 - protein, 161 aa, Cyanophage S-2L
  misc_feature: >New ORF = left: 22978 right: 23460 frame: -2 size(aa): 161
HGGRGPVSTESRGGTARWGGPAGGLCRRAVLSLLLSPVPRFPGITLLLLTPFFSLSPRGGVAQQHNRGNRAVGRADSRCQPLPDPPGTARHSGTDCVALCHRSDHPLCYPPWTGAQRLTGLPLGSLARRSRTGSQPRLSMVSRIRFPKPGPRRPTSGSILR

SEQ ID NO: 283 - protein, 110 aa, Cyanophage S-2L
  misc_feature: >New ORF = left: 22983 right: 23312 frame: -1 size(aa): 110
PPFFLSLLGGGWHNSTTGGIGPWDGQIRGANPSRTPPARPGTVARTVSPCATVPTIPCATPPGRAPNASPGCRSGRWRDAAARAPSPGSAWCPGSAFRSPGHGVPPRARS

SEQ ID NO: 284 - protein, 60 aa, Cyanophage S-2L
  misc_feature: >New ORF = left: 23109 right: 23288 frame: 1 size(aa): 60
GVGRPSRGGSTGDGRNGGTGRHSPCHCAGPCRGGPGGVGTSNLPVPRPDSPCCAVVPPPP

SEQ ID NO: 285 - protein, 139 aa, Cyanophage S-2L
  misc_feature: >New ORF = left: 23138 right: 23554 frame: 3 size(aa): 139
HRGWSERWHRATQSVPLCRAVPGGSGRGWHLESARPTARFPLLCCCATPPLGEREKKGVRSNRVIPGNRGTGERRSDSTARRHRPPAGPPHRAVPPRDSVETGPLPPCYTGDDNDAIERPCCSPTCPNGRAKHPRTCLT

SEQ ID NO: 286 - protein, 251 aa, Cyanophage S-2L
  misc_feature: >New ORF = left: 23316 right: 24068 frame: -1 size(aa): 251
HPERQGAIPPDNTLRQTEQVPQDEPLGVGAKLQELGPDRPLPGDLDGLPAEHVPLGRQGLLDAGQRRRHLVGIKEPEGATKARHRQFGVGHLGGGGQQVFDRHPLRRSSQARVSSAQTIASARSLLEIVQPCRQRFTYSVASIRSCWVVPGRRSLKKRNSRLLSVSKSMKATSDRSGGVSPSHSGMSENSMVARLRRCHPQYSTAGGARSRLSPGVGRPGGGVPQGVCAVVPCCRSSFPPFPGSPVSPCYS

SEQ ID NO: 287 - protein, 50 aa, Cyanophage S-2L
  misc_feature: >New ORF = left: 23323 right: 23472 frame: 2 size(aa): 50
QGDTGEPGNGGKEERQHGTTAQTPCGTPPPGRPTPGLSRDRAPPAVLYWG

SEQ ID NO: 288 - protein, 73 aa, Cyanophage S-2L
  misc_feature: >New ORF = left: 23331 right: 23549 frame: 1 size(aa): 73
YRGTGERGKGGATARHDGTDPLRDPPTGPSHPGTQSRPGPSRRAILGMTTTQSSDHAVLRHARMGGRNTPGPV

SEQ ID NO: 289 - protein, 156 aa, Cyanophage S-2L
  misc_feature: >New ORF = left: 23464 right: 23931 frame: -2 size(aa): 156
RPSCRARTPWPPGAARRRPETSASRGDQGTGGRNEGSTPPVRGGPPRWGWPAGLRSSSFEAELPGPRFFGPDHRVGQVTLGDRPAMPAEIHVLGGQHPVVLGGARQAVAKEAQLQAPQRFQEHEGYVRQVRGCFALPFGHVGEQHGRSIASLSSPV

SEQ ID NO: 290 - protein, 95 aa, Cyanophage S-2L
  misc_feature: >New ORF = left: 23476 right: 23760 frame: 2 size(aa): 95
QRRNRATMLFSDMPEWEGETPPDLSDVAFMLLETLRSLELRFFSDRLPGTTQHDRMLATEYVNLCRHGWTISKSDLADAMVWAEETRAWELRLKG

SEQ ID NO: 291 - protein, 62 aa, Cyanophage S-2L
  misc_feature: >New ORF = left: 23663 right: 23848 frame: 3 size(aa): 62
ISAGMAGRSPRVTWPTRWSGPKKRGPGSSASKDDDRRPAGHPHRGGPPRTGGVEPSLRPPVP

SEQ ID NO: 292 - protein, 109 aa, Cyanophage S-2L
  misc_feature: >New ORF = left: 23700 right: 24026 frame: 1 size(aa): 109
PGRRDGLGRRNAGLGAPPQRMTIEDLLATPTEVAHPELAVSSLRCALRFLDPHEMPTSLACVEQPLAAKGYVLGRKAVKVAWQRAIRAELLELRPHSKRLVLRNLLRLS

SEQ ID NO: 293 - protein, 108 aa, Cyanophage S-2L
  misc_feature: >New ORF = left: 23756 right: 24079 frame: -3 size(aa): 108
TYYSIPNGRAQYPRTIRYDRRSRFLKTSRLEWGRSSRSSARIALCQATLTAFLPSTYPLAARGCSTQARDVGISWGSRNRRAQRRLDTASSGWATSVGVASRSSIVIL

SEQ ID NO: 294 - protein, 80 aa, Cyanophage S-2L
  misc_feature: >New ORF = left: 23764 right: 24003 frame: 2 size(aa): 80
RSKTCWPPPPRWPTPNWRCRAFVAPSGSLIPTRCRRLWPASSSPWRPRGTCSAGRPSRSPGKGRSGPSSWSFAPTPSGSS

SEQ ID NO: 295 - protein, 194 aa, Cyanophage S-2L
  misc_feature: >New ORF = left: 23852 right: 24433 frame: 3 size(aa): 194
SPRDADVSGLRRAAPGGQGVRARQEGRQGRLAKGDPGRAPGASPPLQAARLEEPAPSVVAYCPGVLRPAVRDAIIRSEHRKNQWPSPPSSRPPTFPPPPKAWSFATCRPRSPASPAPRCPSRPPRCNRPWPAPATTPPPRKPPSSGPPPPPPRCPWPPIAPARPSTGPSPSCRSPDPPAKRGGPSRASPVILRP

SEQ ID NO: 296 - protein, 172 aa, Cyanophage S-2L
  misc_feature: >New ORF = left: 23935 right: 24450 frame: -2 size(aa): 172
HRYLSHGRSITGEAREGPPRLAGGSGDRQDGDGPVEGLAGAIGGQGHLGGGGGGPELGGFLGGGVVAGAGQGLLHLGGRLGHLGAGEAGDRGLQVANDQALGGGGKVGGLDEGGEGHWFFLCSERIIASRTAGRNTPGQYATTDGAGSSRRAAWSGGEAPGARPGSPFARRP

SEQ ID NO: 297 - protein, 123 aa, Cyanophage S-2L
  misc_feature: >New ORF = left: 24007 right: 24375 frame: 2 size(aa): 123
GTCSVCRSVLSGGIAPCRSGCYNTFRTQEKPMALASFIQTTDLSAATQGLVIRHLQTAISCLTRTEMPKSATEVQQALAGAGYDATTEEAAELWTAAATAQVPLASNRTRKALYRAVAVLPVA

SEQ ID NO: 298 - protein, 60 aa, Cyanophage S-2L
  misc_feature: >New ORF = left: 24072 right: 24251 frame: -1 size(aa): 60
PAPARACCTSVADLGISVRVRQEIAVCRWRMTRPWVAAERSVVWMKEARAIGFSCVLNVL

SEQ ID NO: 299 - protein, 220 aa, Cyanophage S-2L
  misc_feature: >New ORF = left: 24075 right: 24734 frame: 1 size(aa): 220
YVQNTGKTNGPRLLHPDHRPFRRHPRPGHSPPADRDLLPHPHRDAQVGHRGATGPGRRRLRRHHRGSRRALDRRRHRPGAPGLQSHPQGPLPGRRRPAGRLTRRPNEGGPPGPPRLYSAHDSGIDVTAGPGGAPGRATARRRAEVRHCAPDDGLSGRVRHLGAGGLQADPGRQGQTGHRPRCGGPVRGDGCHPGPLGVGLCWGDAERGLGLRLQGPAGHL

SEQ ID NO: 300 - protein, 106 aa, Cyanophage S-2L
  misc_feature: >New ORF = left: 24194 right: 24511 frame: -3 size(aa): 106
RTSARLRAVALPGAPPGPAVTSIPESWAEYNRGGPGGPPSFGRRVRRPAGRRRPGRGPCGCDWRPGAPGRWRRRSRARRLPRWWRRSRRRPGPVAPRWPTWASRCG

SEQ ID NO: 301 - protein, 126 aa, Cyanophage S-2L
  misc_feature: New ORF = left: 24379 right: 24756 frame: 2 size(aa): 126
PAGQTRGALPGLPGYTPPMTQVSMSRRDQVEHLVELLREGGQKSVTAHLMTVCLDEFGISAPEAFKRIRDAKAKLATGLDAVDRSEEMAATLARWESVFAGAMRSEDWGSACKALQGICNMLGLKP

SEQ ID NO: 302 - protein, 113 aa, Cyanophage S-2L
  misc_feature: New ORF = left: 24441 right: 24779 frame: -1 size(aa): 113
LAGIGPRQGFNPSMLQMPCRALQAEPQSSLRIAPAKTDSQRARVAAISSDRSTASRPVASLALASRIRLKASGAEMPNSSRQTVIRCAVTDFCPPSRSSSTRCSTWSRRDIDT

SEQ ID NO: 303 - protein, 87 aa, Cyanophage S-2L
  misc_feature: New ORF = left: 24487 right: 24747 frame: -2 size(aa): 87
PQHVTDALQGLAGGAPVLAPHRPSKDRLPAGQGGSHLLGPVHRIEAGGQFGLGVPDPLEGLRRRDAELVQTDRHQVRSDGLLPAFAQ

SEQ ID NO: 304 - protein, 73 aa, Cyanophage S-2L
  misc_feature: New ORF = left: 24530 right: 24748 frame: 3 size(aa): 73
RSVWTSSASRRRRPSSGSGTPRPNWPPASMRWTGPRRWLPPWPAGSRSLLGRCGARTGAPPARPCRASVTCWG

SEQ ID NO: 305 - protein, 784 aa, Cyanophage S-2L
  misc_feature: New ORF = left: 24575 right: 26926 frame: -3 size(aa): 784
EGPASGVGDGADRWGPRRPVALPSYPRGSGVDSERRIADQLDDRHQAGLGVDELPAVGIDQVGVLGVVRGVGLVGDPEDPHRAVPVGGEHLLEAEDVLPVAHPEVALDALPDGAVGHQVDGVLVPIGGVDRRGEQVVHDDTEASHVGNAGLGDPDAAAAPLDLAPGGQAVGAEGQHPDGLQVVRKIAVHGRDLEHGAPLTEPGLTPEHHRRAQEVVRVARAGAGPADVNHVGGGQGAPEGALHGGQGPLRLEALGPGDDVGLEGRHRVDAGDDLGELVGAGSEAPVHDGEFPVPGVELLGGQVAFAAGAPGAVALDRLRRGDERVDQGQADRGAPVAGVEPFVALDRAGVDPGEAVEHLLTDGGPELGAVGELPQVACERGAPVGGPARADADGGGGGETPEVAQVGCLSHGGLSGGGLRDAGCGLHLGGELWVLGLERQLPGPVPAGFGPGVGDVLCCAATATDGGRRDRGAHASPTAGGKVVLESGVGRLEAGHVLGQVPLDSPLQEGEAGFGLPDAATKDGVQLLRSDHAGRMEDGQGGRLEPFALLAFLLGLDLCLERGHLGLEGRHGLLGRLPKGLVLLLVLELGLGLLPKLALQVGQALVELGVGLAQALLVLFDQVELGKGRRQLLGDVAAGRHWRSGVCLRRRLRHWRGRGLRCHSGADSRTESAYEASPWPYSWICRRPCRWGAPRAPRPRRTGPGRGPRGRAPRFDWQASGLVKVLTPACYRCPAGPCRRSPSPRSASPQQRPTPSGPGWQPSPRTGPPHRGRWPVWPWRPGSA

SEQ ID NO: 306 - protein, 316 aa, Cyanophage S-2L
  misc_feature: New ORF = left: 24751 right: 25698 frame: -2 size(aa): 316
AMVASQVVVYVTPAAAFIWAASSGFLAWSASCPVRFQPALVQGLETSSAALPPPPTGAAETGVPMPRPPLGAKWCSNPELGALRLATYWARSRSTPPCRKARPDSVCRMPPPRMVYSCSGATTPAEWKTARADDLSRSRCWPSFSVSICVLSVATSVSRVATVCLAASQRALYCCWSSSLASVCSRSWRSRSVRRWLSSVLVWPRRCLSCLTRSSLARAADSCWATSPLGATGAAGSASGVGSATGGVGVCAAIRGLIRGRSQRTRLRLGLTLGFAGGLAGGGRLGRHVLGVPAQVGAPGAGHPDLIGRHRASSRF

SEQ ID NO: 307 - protein, 53 aa, Cyanophage S-2L
  misc_feature: New ORF = left: 24752 right: 24910 frame: 3 size(aa): 53
NLDEARCLPIKSGCPAPGAPTWAGTPRTWRPRRPPPARPPANPRVRPRRSLVR

SEQ ID NO: 308 - protein, 74 aa, Cyanophage S-2L
  misc_feature: New ORF = left: 24760 right: 24981 frame: 2 size(aa): 74
RGPMPANQIWVPGPWGPDLGRYAEDVAPEAPPTGKAAGKSKSKAKAKPRTLTPSANQPPNGSANPDPASGGADA

SEQ ID NO: 309 - protein, 77 aa, Cyanophage S-2L
  misc_feature: New ORF = left: 24888 right: 25118 frame: 1 size(aa): 77
GQGEASYADSVRESAPEWQRKPRPRQWRSRRLRQTPLRQWRPAATSPSSCLRPLPSSTWSNRTSSAWARPTPSSTNA

SEQ ID NO: 310 - protein, 252 aa, Cyanophage S-2L
  misc_feature: New ORF = left: 24914 right: 25669 frame: 3 size(aa): 252
LRPRISPRMAAQTPTPPVAEPTPEADPAAPVAPSGDVAQQLSAALAKLDLVKQDKQRLGQTNTELNQRLTDLERQLREQTEAKLEDQQQYKALWEAAKQTVATLETEVATLKTQIETEKEGQQRERLKSSALAVFHSAGVVAPEQLYTILGGGIRQTESGLAFLQGGVERDLAQYVASLKAPNSGFEHHFAPSGGRGMGTPVSAAPVGGGGSAAEDVSNPWTKAGWNRTGQLALQAKNPELAAQMKAAAGVT

SEQ ID NO: 311 - protein, 287 aa, Cyanophage S-2L
  misc_feature: New ORF = left: 24985 right: 25845 frame: 2 size(aa): 287
GRPRCASGAQRRRRPAAVCGPCQARPGQTGQAAPGPDQHRAQPTPDRPGAPASGADRGQARGPAAVQGPLGGGQADRGDPRDRGGHAQDTDRDREGRPTARTAQVVRPGRLPFCRRGRSGAAVHHPWWRHPADRIRPRLPAGGSRAGPGPVRGQPQGAQLRIRAPLCPQRWARHGHPGLCGPRRWRWQRSRGRLQPLDQSRLEPDRATGAPGQEPRARRPDEGRSRRHVNHHLRGHHGSSSPPGQLRGFHHPHPRRHRLERVPQLGHHVRRRPGGARQPPRVRGRHP

SEQ ID NO: 312 - protein, 175 aa, Cyanophage S-2L
  misc_feature: New ORF = left: 25122 right: 25646 frame: 1 size(aa): 175
PTWSASFGSRPRPSSRTSSSTRPFGRRPSRPWRPSRPRWPRSRHRSRPRRKANSANGSSRPPWPSSILPAWSLRSSCTPSLVAASGRPNPASPSCRGESSGTWPSTWPASRRPTPDSSTTLPPAVGEAWAPRSLRPPSVAVAAQQRTSPTPGPKPAGTGPGNWRSRPRTQSSPPR

SEQ ID NO: 313 - protein, 51 aa, Cyanophage S-2L
  misc_feature: New ORF = left: 25296 right: 25448 frame: -1 size(aa): 51
GWPRTGPGPARLPPAGRRGRIRSAGCRHQGWCTAAPERPRRQNGRRPGRTT

SEQ ID NO: 314 - protein, 71 aa, Cyanophage S-2L
  misc_feature: New ORF = left: 25452 right: 25664 frame: -1 size(aa): 71
RRLRPSSGRRALGSWPGAPVARSGSSRLWSRGWRRPLLRCHRHRRGPQRPGCPCLAHRWGQSGARIRSWAP

SEQ ID NO: 315 - protein, 99 aa, Cyanophage S-2L
  misc_feature: New ORF = left: 25650 right: 25946 frame: 1 size(aa): 99
RPQPASRKPPPERPPWLKQPTWATSGVSPPPPPSASARAGPPTGAPRSQATWGSSPTAPSSGPPSVRRCSTASPGSTPARSSATNGSTPATGAPRSACP

SEQ ID NO: 316 - protein, 385 aa, Cyanophage S-2L
  misc_feature: New ORF = left: 25685 right: 26839 frame: 3 size(aa): 385
EATMAQAAHLGNFGGFTTPTPVGIGSSGSPNWGTTFAGDLGELANRPEFGAAIREEVFNSFAWINSGAIQRDERLDARNRGASISLPLINPFIPTSETIKSNSTWGASGKGYLTPQKLNAGDWKLPIVHRGFAAGADELSEIITGIDPMAALESYIVAGAQRLETQRALATMEGALRGPLSTTHVVDISRTGTGPSDADNFLSSSVMLRGKARLGERGSMLQIAAMHSDLAHYLESVGMLTFSSDSLTAGGEIKWGGGGIGVTQARVADMAGFRVIVDDLLAPTIDATNGDKYPVYLMANGAIRQGIQRDFRVRYGENILSFQEVLAADWHGSMGVLGISYESNAPDNPEDADLIDPDSWELVYTEPRLVPIVKLVCNSPFAVNP

SEQ ID NO: 317 - protein, 105 aa, Cyanophage S-2L
  misc_feature: New ORF = left: 25702 right: 26016 frame: -2 size(aa): 105
PLPLAPQVLLLLIVSDVGMNGLIRGRLIEAPRLRASSRSSRWIAPELIQAKLLNTSSRMAAPNSGRLASSPRSPANVVPQLGDPLEPMPTGVGVVKPPKLPRWAA

SEQ ID NO: 318 - protein, 131 aa, Cyanophage S-2L
  misc_feature: New ORF = left: 25849 right: 26241 frame: 2 size(aa): 131
GGVQQLRLDQLRRDPARRTARRPQPGRLDQPAPDQPVHPHVGDDQEQQHLGRQRQRLPDPPEAQRRGLETPHRAPGLRCRRRRALRDHHRHRPDGGPRVLHRRRGPAPRDATGPGHHGGRPPGPPVHHPRG

SEQ ID NO: 319 - protein, 88 aa, Cyanophage S-2L
  misc_feature: New ORF = left: 26025 right: 26288 frame: 1 size(aa): 88
PPRSSTPGTGNSPSCTGASLPAPTSSPRSSPASTRWRPSSPTSSPGPSASRRNGPWPPWRAPSGAPCPPPTWLTSAGPAPARATRTTS

SEQ ID NO: 320 - protein, 77 aa, Cyanophage S-2L
  misc_feature: New ORF = left: 26149 right: 26379 frame: -2 size(aa): 77
CARSLCMAAIWSMEPRSPSRALPRSITEELRKLSASLGPVPVRLMSTTWVVDRGPRRAPSMVARARCVSRRWAPATM

SEQ ID NO: 321 - protein, 53 aa, Cyanophage S-2L
  misc_feature: New ORF = left: 26250 right: 26408 frame: -1 size(aa): 53
RSASRRTPGSAQDRCAWPRSGAWSPAHRAGPYPGASPKSSGSCPRRSGRCRSG

SEQ ID NO: 322 - protein, 244 aa, Cyanophage S-2L
  misc_feature: New ORF = left: 26332 right: 27063 frame: 2 size(aa): 244
AGLHAPDRGHAQRSCALPGVRRDADLQLRQPDRRGRDQVGRRRHRGHPGPRCRHGWLPCHRGRPARPDDRRHQWGQVPRLPDGQRRHPAGHPARLPGALRGEHPQLPGGARRRLARLDGGPRDLLRVQRPGQPRGRRPDRSRQLGARLHRAPPGADRQAGLQFAVRCQPLSPWGRMARPRDAVAPNGRPRLPPRRRGLPMLGRCCAPRWSSSPLTWPTPTPTWLWAPGAPSGWPSGTKPPGRWP

SEQ ID NO: 323 - protein, 62 aa, Cyanophage S-2L
  misc_feature: New ORF = left: 26383 right: 26568 frame: -2 size(aa): 62
TGYLSPLVASIVGASRSSTMTRKPAMSATRAWVTPMPPPPHLISPPAVRLSELKVSIPTDSR

SEQ ID NO: 324 - protein, 56 aa, Cyanophage S-2L
  misc_feature: New ORF = left: 26577 right: 26744 frame: 1 size(aa): 56
WPTAPSGRASSATSGCATGRTSSASRRCSPPTGTARWGSSGSPTSPTPRTTPRTPT

SEQ ID NO: 325 - protein, 52 aa, Cyanophage S-2L
  misc_feature: New ORF = left: 26646 right: 26801 frame: -1 size(aa): 52
RSAPGGARCRRAPSCRDRSGRRPRGCPGRWTRRRSRGPPSSRASRRRAPPGS

SEQ ID NO: 326 - protein, 428 aa, Cyanophage S-2L
  misc_feature: New ORF = left: 26776 right: 28059 frame: -2 size(aa): 428
GRLLVRCTSSPATRRRASASDCGVLAPSGATSLEGRLLLANQEERNRPVSTGLTAALPRSAWAWTTVRRSWAPRASDRCFLSASGSLNVGILVLTNELAGDQALAGVGGVGFCDAPDPAVVGDGVPGGWFVREAPGPMVDPEPHLPGLLGAAPLALAIAQHPGIDRVLDDVPGEHPRGRVVGLGLGPPVQDRRGEGPVDQLGRDRQEGGGNVHTARLLSCGPGAGLWTCSAASIPGSSRSRGRPAAGGGRFGRSGSSTRPSRRTTAGGRPGPDSWPRARPGCRRGPRLQNRGVGPGPPRRLPSPSTRRMAWRRRPSGGPGSAASGASGTPRSGPPAGRLRPRRPARGGPGRPEPCRRRRRPGQRGGAPSGGTAPPQHRKAPPPGWETGPTVGGHGVPWPCHPTPGAQGLTANGELQTSLTIGTRRGSV

SEQ ID NO: 327 - protein, 115 aa, Cyanophage S-2L
  misc_feature: New ORF = left: 26835 right: 27179 frame: -1 size(aa): 115
GQGHLGVCRHPALVEWPGAGVRRAVPDRQRLEPAERLGQGHLPGGFVPDGQPEGAPGAQSHVGVGVGQVNGEELHRGAQHRPNIGRPRLRGGRRGRPLGATASRGLAILPQGLRG

SEQ ID NO: 328 - protein, 183 aa, Cyanophage S-2L
  misc_feature: New ORF = left: 26856 right: 27404 frame: 1 size(aa): 183
DGKATGRRGPQRSAPSPTPEAGPSYVGAVLCPPMELLPVDLADADAYMALGARGPLWLAVGDEAARQVALTEAFRWLQTLPIRDRPTDACARPFDECWVTANAEVALALHRDSAAVVPAGSQAGPVAKSQALGALQQSFFSMAEWKTRYDQNDHPLLRAFPWIYSILGCWLPSKSKVLHRVRS

SEQ ID NO: 329 - protein, 162 aa, Cyanophage S-2L
  misc_feature: New ORF = left: 26975 right: 27460 frame: 3 size(aa): 162
PGRRRRLHGSGRPGPPLAGRRGRSRPAGGPDRGVPLAPDAADPGPPDGRLRQAIRRVLGDGKRRGGPGPTPRFCSRGPRRQPGRARGQESGPGRPPAVVLLDGRVEDPLRPKRPPPAAGLPLDLLDPGMLAAEQVQSPAPGPQLSSLAVWTLPPPSCLSRPS

SEQ ID NO: 330 - protein, 82 aa, Cyanophage S-2L
  misc_feature: New ORF = left: 26996 right: 27241 frame: -3 size(aa): 82
LLATGPAWLPAGTTAAESRCRARATSAFAVTQHSSNGLAQASVGRSRIGSVWSQRNASVRATCRAASSPTASQRGPRAPRAM

SEQ ID NO: 331 - protein, 85 aa, Cyanophage S-2L
  misc_feature: New ORF = left: 27154 right: 27408 frame: 2 size(aa): 85
RQTPRWPWPYTAILQPWSPPAARPGPWPRVRPWAPSSSRSSRWPSGRPATTKTTTPCCGPSPGSTRSWDAGCRASPKSCTGSAAE

SEQ ID NO: 332 - protein, 111 aa, Cyanophage S-2L
  misc_feature: New ORF = left: 27183 right: 27515 frame: -1 size(aa): 111
DSVWARRYRIGVGKVLSISWAATGRKVAVTSIPPGYSAADPVQDFGLARQPASQDRVDPGEGPQQGVVVLVVAGLPLGHREERLLEGAQGLTLGHGPGLAAGGDHGCRIAV

SEQ ID NO: 333 - protein, 123 aa, Cyanophage S-2L
  misc_feature: New ORF = left: 27408 right: 27776 frame: 1 size(aa): 123
VAWRYGRYRHLPACRGPADRQDLPHADPVPAGPDRVLRPGHGGAHPGRRRVPDQCRGAGLSQERAERRRGGPGGAALDPPWARGPPGRTNHRGHRRLRRRDLARHRSRPHLHQPGPDRQPTRL

SEQ ID NO: 334 - protein, 129 aa, Cyanophage S-2L
  misc_feature: New ORF = left: 27412 right: 27798 frame: 2 size(aa): 129
PGGMDVTATFLPVAAQLIDRTFPTPILYRRAQTESYDPATGVLTRDVVEYPINAGVLGYRKSERSGAEEAREVRLWIHHGPGGLPDEPTTGDTVAYDGGIWRVTEADPTYTSQGLIASQLVCEYQYADV

SEQ ID NO: 335 - protein, 97 aa, Cyanophage S-2L
  misc_feature: New ORF = left: 27464 right: 27754 frame: 3 size(aa): 97
STGPSPRRSCTGGPRPSPTTRPRGCSPGTSSSTRSMPGCWAIARASGAAPRRPGRCGSGSTMGPGASRTNQPPGTPSPTTAGSGASQKPTPPTPARA

SEQ ID NO: 336 - protein, 50 aa, Cyanophage S-2L
  misc_feature: New ORF = left: 27569 right: 27718 frame: -3 size(aa): 50
RARSRRRRRRCPRWLVRPGGPRAHGGSRAAPPGPPRRRSARSCDSPAPRH

SEQ ID NO: 337 - protein, 197 aa, Cyanophage S-2L
  misc_feature: New ORF = left: 27722 right: 28312 frame: -3 size(aa): 197
TGRRAGSGASRRCCRRRLTPGPLRRRRRPRGWRGWGRRTSQVVLLLDELAGGVLDPGQPGLTEGPEPGGGLRHDSAFDSDGFSVGQTVGQVHLVAGHQAQGLGVGLRGAGALRGHLARGPALAGEPGGAEPAGVDGAHCGAPKVGLGLDDGEAQLGAQGLGQVLLERLGIVKRRHTGTHKRVGWRSGPGWCRWGRLL

SEQ ID NO: 338 - protein, 145 aa, Cyanophage S-2L
  misc_feature: New ORF = left: 27758 right: 28192 frame: 3 size(aa): 145
SPANSFVSTSMPTFNDPEALKKHLSEALGAQLRLTVVQAQADLGSAAVSPVDTGRFRSSWFASKSRPSSEVAPEGASTPQSDAEALRLVAGDEVHLTNSLPYAEAVAVEGRVVSKPATWFRSFREARLPRIQDAAGKLIKKQYDL

SEQ ID NO: 339 - protein, 88 aa, Cyanophage S-2L
  misc_feature: New ORF = left: 27802 right: 28065 frame: 2 size(aa): 88
RSRGAQEAPVRGPGRPAAPHRRPGPGRPWERRSEPRRHRPVPLLLVRQQEPALERGGPGGRQHPAIRRRGPAPGGRRRGAPDQQSALR

SEQ ID NO: 340 - protein, 103 aa, Cyanophage S-2L
  misc_feature: New ORF = left: 27861 right: 28169 frame: -1 size(aa): 103
ACRRRPGSWATGPHGRTGTRWRASTRLGLRQRRLQRRADCWSGAPRRRPPGAGPRRRIAGCWRPPGPPRSRAGSCWRTRRSGTGRCRRGSLRRSQGRPGPGRR

SEQ ID NO: 341 - protein, 93 aa, Cyanophage S-2L
  misc_feature: New ORF = left: 28047 right: 28325 frame: 1 size(aa): 93
PTVCPTLKPSLSKAESCRSPPPGSGPSVRPGCPGSRTPPASSSRSSTTCDVLRPHPRHPRGRRRRRSGPGVSRLRQHLRDAPEPALRPVHRQL

SEQ ID NO: 342 - protein, 65 aa, Cyanophage S-2L
  misc_feature: New ORF = left: 28063 right: 28257 frame: -2 size(aa): 65
HRVHCGGDVALEDGADGGEGHHRSYCFLMSLPAASWILGNRASRKDRNQVAGFDTTRPSTATASA

SEQ ID NO: 343 - protein, 161 aa, Cyanophage S-2L
  misc_feature: New ORF = left: 28132 right: 28614 frame: 2 size(aa): 161
GPVAQDPGRRRQAHQEAVRPVMSFAPIRAILEGDVAAAVDPVSVVFDNTFETPPSLPYVRFTVSFDAPTSDAIGGGMASHVTGVVQANVYVAKMTGSLGGELLAAKILDAWQDLAAAAVVPPGWRVVPRSLEGPQTLAPDKREAHVVVVGAAFSATLYETP

SEQ ID NO: 344 - protein, 59 aa, Cyanophage S-2L
  misc_feature: New ORF = left: 28196 right: 28372 frame: 3 size(aa): 59
CPSPPSAPSSRATSPPQWTRCQSSSTTPSRRPRACPTSGSPSALTPRRRTPSAAAWPPT

SEQ ID NO: 345 - protein, 123 aa, Cyanophage S-2L
  misc_feature: New ORF = left: 28261 right: 28629 frame: -2 size(aa): 123
RRPRLGRLVERRREGGPDDHDVGLPLIRGQGLRPLQGTGHDAPPGGHDGCSGQVLPGVQDLGRQELPAQAACHLGHVDVGLHHPGHVGGHAAADGVRRRGVKADGEPDVGQARGRLEGVVEDD

SEQ ID NO: 346 - protein, 155 aa, Cyanophage S-2L
  misc_feature: New ORF = left: 28322 right: 28786 frame: -3 size(aa): 155
SWSAGTVISVPAGKSVLSSRQCRVAAGMNAADPSIPDRRVFEQVTGIWGLGVTSSQIRASRRASPRRRPRRPRRGPPAYPGPGSAAPPGNGARRATRGARRLQRPGPARRPGSWPPGAPRPGCLSSWPRRRWPAPPRSRGRPCRRRWRPTSGRQS

SEQ ID NO: 347 - protein, 74 aa, Cyanophage S-2L
  misc_feature: New ORF = left: 28329 right: 28550 frame: 1 size(aa): 74
RPDVGRHRRRHGLPRDRGGAGQRLRGQDDRQPGRGAPGGQDPGRLAGPGRCSRRAPRVARRAPFPGGAADPGPG

SEQ ID NO: 348 - protein, 67 aa, Cyanophage S-2L
  misc_feature: New ORF = left: 28401 right: 28601 frame: -1 size(aa): 67
SVAEKAAPTTTTWASRLSGARVCGPSRERGTTRHPGGTTAAAARSCQASRILAARSSPPRLPVILAT

SEQ ID NO: 349 - protein, 74 aa, Cyanophage S-2L
  misc_feature: New ORF = left: 28415 right: 28636 frame: 3 size(aa): 74
QAAWAGSSWRPRSWTPGRTWPLQPSCPPGGASCPVPWRGRRPWPRISGRPTSWSSGPPSRRRSTRRPNLGRRHP

SEQ ID NO: 350 - protein, 298 aa, Cyanophage S-2L
  misc_feature: New ORF = left: 28554 right: 29447 frame: 1 size(aa): 298
AGGPRRGRRGRLLGDALRDALIWDDVTPRPQMPVTCSKTLLSGIDGSAAFIPAATRHCLLDNTDFPAGTEITVPADHDYLVGDPVTFEAQGTAVLDTALTEGTTYYVVTEAHGASPHIEVSATAGGAPITLNGDGGTGTANSGAPAQNHIKIQFAAHMALCQVQGWNCNLSREEVMTTSLQCGPTTDNGANAPFMTRQAGYVDGSGSMVVRFTRDQESLSRRLLRNSLRKNQDGASVQLFVDTVYGPSGTIDLAGSEFIEGPVSILGFALGVTTGSEPTQGTVNFSFSDQPTNIFGAL

SEQ ID NO: 351 - protein, 377 aa, Cyanophage S-2L
  misc_feature: New ORF = left: 28617 right: 29747 frame: -1 size(aa): 377
SALTRSATYSALTDRRSWARSPGANRGWPLASFALRISRPRLTSSCSSLLAFSAAWRRSARVTGVVYISSVAPDRKVIRCRLSVWRLDSALSRSIARMSSEGSEDVGGLVAETEVDGALGGLRPGGYAQGEAQDRHRALDELGAGQVDGAAGAVDRVDEQLHRGAVLVLPEAVAEEAARQRLLVPGEADHHRAGAVDVAGLAGHERGIGAVVGRRPALQARGHDLLPAEVAVPALDLAEGHVGSELDLDVVLGRGPGVGGTGAAVTVQGDRGAPCGGGHLDVGAGAVGLGDHVVGGALGQGGIQDGGALGLERDGITHQVVVVGRDRDLGTSREIGVVEQAVPGSGGDERGRPVDPRQEGFRAGDGHLGPRGDVVPD

SEQ ID NO: 352 - protein, 77 aa, Cyanophage S-2L
  misc_feature: New ORF = left: 28618 right: 28848 frame: 2 size(aa): 77
SGTTSPLGPRCPSPARKPSCRGSTGRPRSSPPLPGTACSTTPISRLVPRSRSRPTTTTWWVIPSRSRPRAPPSWIPP

SEQ ID NO: 353 - protein, 53 aa, Cyanophage S-2L
  misc_feature: New ORF = left: 28640 right: 28798 frame: 3 size(aa): 53
APDARHLLENPPVGDRRVGRVHPRRYPALPARQHRFPGWYRDHGPGRPRLPGG

SEQ ID NO: 354 - protein, 50 aa, Cyanophage S-2L
  misc_feature: New ORF = left: 28802 right: 28951 frame: 3 size(aa): 50
SRHVRGPGHRRPGYRPDRGHHLLRGHRGPRRQPPHRGVRHRRGRPDHPER

SEQ ID NO: 355 - protein, 94 aa, Cyanophage S-2L
  misc_feature: New ORF = left: 28871 right: 29152 frame: -3 size(aa): 94
PAWRVMNGALAPLSVVGPHCRLVVMTSSRLRLQFQPWTWQRAMWAANWILMWFWAGAPELAVPVPPSPFRVIGAPPAVADTSMWGLAPWASVTT

SEQ ID NO: 356 - protein, 186 aa, Cyanophage S-2L
  misc_feature: New ORF = left: 28955 right: 29512 frame: 3 size(aa): 186
RRHRYRQLRGPGPEPHQDPVRCPHGPLPGPGLELQPQPGGGHDHEPAVRADDRQRRQCPVHDPPGRLRRRLRLDGGPLHPGPGVAVSPPPPQQPPEEPGRRLGAAVRRHGLRPQRHHRPGRLRVHRGPGVDPGLRPGRNHRVGAHPGHRQLQFQRPAHQHLRSPLTTCERSTCSRQNPTSRRSSGT

SEQ ID NO: 357 - protein, 76 aa, Cyanophage S-2L
  misc_feature: New ORF = left: 29140 right: 29367 frame: 2 size(aa): 76
PARPATSTAPARWWSASPGTRSRCLAASSATASGRTRTAPRCSCSSTRSTAPAAPSTWPAPSSSRARCRSWASPWA

SEQ ID NO: 358 - protein, 62 aa, Cyanophage S-2L
  misc_feature: New ORF = left: 29288 right: 29473 frame: -3 size(aa): 62
AGRSLACRQRAPKMLVGWSLKLKLTVPWVGSDPVVTPRAKPRIDTGPSMNSEPARSMVPLGP

SEQ ID NO: 359 - protein, 156 aa, Cyanophage S-2L
  misc_feature: New ORF = left: 29371 right: 29838 frame: 2 size(aa): 156
PPGRSPPRAPSTSVSATSPPTSSEPSDDMRAIDLLKAESNLQTLKRHLITFRSGATLEMYTTPVTLAERRQAAENAKSDEQLEVNLGLLILKAKDANGQPLFAPGDLAQLRRSVSAEYVADLVNALYSTPALDEGEASDPKPSSPSSGKTNSSSSN

SEQ ID NO: 360 - protein, 178 aa, Cyanophage S-2L
  misc_feature: New ORF = left: 29416 right: 29949 frame: -2 size(aa): 178
GAPPPGSGPGPARGRARPRSCPAASGPRSSRARRPGSVRTGAVCLAGTGRGGLWVGGLALVQGRRRVERVDQVGHVLGADGPAQLGQVAGGEQGLAVGVLRLEDQQAEVDLQLLVALGVLGGLATLGQGDRGGVHLERGTGPEGDQVPLERLEVGFCLEQVDRSHVVRGLRRCWWAGR

SEQ ID NO: 361 - protein, 171 aa, Cyanophage S-2L
  misc_feature: New ORF = left: 29451 right: 29963 frame: 1 size(aa): 171
RHASDRPAQGRIQPPDAQAAPDHLPVRCHARDVHHPGHPGRASPGRRERQERRAAGGQPRPADPQGEGRQRPAPVRPRRPGPAAPVRQRRVRGRPGQRALLDACPGRGRGLRPKALLAQFRQDKQLQFELSLASELGMTWGQMQQDMTEAELALWQVRARYLEEERLRSPV

SEQ ID NO: 362 - protein, 116 aa, Cyanophage S-2L
  misc_feature: New ORF = left: 29639 right: 29986 frame: 3 size(aa): 116
SSRRRTPTASPCSPPATWPSCAGPSAPSTWPTWSTRSTRRLPWTRARPPTQSPPRPVPARQTAPVRTEPGLRARDDLGPDAAGHDRGRARPLAGPGPLPGGGAPQVSGLTWAGGCE

SEQ ID NO: 363 - protein, 63 aa, Cyanophage S-2L
  misc_feature: New ORF = left: 29741 right: 29929 frame: -3 size(aa): 63
RARTCQRASSASVMSCCIWPQVIPSSEARLSSNWSCLSCRNWARRALGRRPRPRPGQASSRAR

SEQ ID NO: 364 - protein, 82 aa, Cyanophage S-2L
  misc_feature: New ORF = left: 29751 right: 29996 frame: -1 size(aa): 82
SKSIRSRLPRSDRRPEALLLQVAGPDLPEGELGLGHVLLHLAPGHPELGGQAQFELELFVLPELGEEGFGSEASPSSRAGVE

SEQ ID NO: 365 - protein, 61 aa, Cyanophage S-2L
  misc_feature: New ORF = left: 29893 right: 30075 frame: 2 size(aa): 61
PRPSSPSGRSGPATWRRSASGLRSDLGRRLRIDFDQRLGGCLDKHPTGREDQHRRHQFTRG

SEQ ID NO: 366 - protein, 133 aa, Cyanophage S-2L
  misc_feature: New ORF = left: 29953 right: 30351 frame: -2 size(aa): 133
PWPRRWRPHPGRRMPGGPPRACRSCRWRPGRCCPLARTHRGPRRSRRPVPGPGAAAPSGQAACPPGGCQRRDRPGRRCSCRQLSYGAGMRTLTACELVATVLILTACGVLVKTTAQPLIEVYSQPPAQVRPET

SEQ ID NO: 367 - protein, 293 aa, Cyanophage S-2L
  misc_feature: New ORF = left: 30087 right: 30965 frame: -1 size(aa): 293
GLERPEDRWHDARPHDRPHVDEPVFQLLDVGAGRVQRGVQLVGPLGADVLQGLEDDVPGELALGRHLAQLPGVDAHDPGHLDADGRRLLHDRVELVAPERPGAQGLGQLPEGALALLGRRAAVPGRRVEALVDVPHLGQGEAQGAESGVGLREAGLGRLLREAELGCGLLGHLLEPGVVVQAGSEPPDPHLGVLGLHPHLQDRVSHGPGGGDHTQGGECPEAPHEHVDLAGGGLGAVAHWPEHIAAPGGPAGPFQAPEPLLHPGKLRVRLAGAKDEIDLVGGAHAGSLATVRA

SEQ ID NO: 368 - protein, 84 aa, Cyanophage S-2L
  misc_feature: New ORF = left: 30101 right: 30352 frame: 3 size(aa): 84
LSCRHEHRLPGRSRLWHPPGGHAACPDGAAAPGPGTGRRDRRGPRCVRANGQQRPGRHRQDRHARGGPPGIRRPGCGRHRRGHG

SEQ ID NO: 369 - protein, 860 aa, Cyanophage S-2L
  misc_feature: New ORF = left: 30105 right: 32684 frame: 1 size(aa): 860
AAGMSTAYQVDLVFGTRQADTQLARMEQRLRGLERAGGTAGGRDVFGPMGNSAQAATGKIDMLVGGLRAFAALGVVATAGAMANSILQMGMQAENTEVRVRGLTAGLDDYARFQEVAQEAAAKFGLSQQAAQAGLAQTYARLRPLGFTLSEVRDVYEGFNTAARNGGSTAQESEGAFRQLAQALGSGALRGDEFNSIMEQTPAIGIEVARVMGINAGQLREMAAEGKLTGDIVLKALQNIRTEGADKLDASLNTTSANVEKLKNRFIDMGTVVGSGVMPPILRTLQALNLLLDQATKNADGLGFALQQAMGIAGGLPVNLGIGIGNVAGRIPGGRQAIQGIGSMLGYQPEKQTFGPFMPEGLEQRSRAQEQARIRREKEAKDAATKSRSRGGGSSGPDFPAYITANQMRDWLRSQGYERTSGDFTNKGHRTPNHMLNAIDIGELDGSYAFAVQRAKALEARLRATGAFGNQLFGPTRDPRGHKDHVHIPTPGGRIRVTPGLAQLMGLNGKGSGGMAMQGAEWANEAAEKEAERQQKREDGLRTSGRALALAQAELKIAQASTDEQRIQATADKDRMDRMYEFADLYRDAVTEEERANIAKAQGVEIQRQQVELAKSLGDALVEVARKQEAAMRPRLDNIERLEATLRGPDAVRALERRNAVGEMSAAGVGPARAGELYDREQALDRQVERQRELNALWEEGGRTLGGLFSDLVKGTDDWQASLTRALESLASVLLQAGLRGIAENNQGGFLGGLLSQVMGSFDGGGYTGSGSRTGGLDGKGGFAAILHPNETVVDHTRGQAAGGGMVNVGGITVNVASDGTTEVDAAGGGELARGVQAAVTAEILRQMRPGGVLAAGQRG

SEQ ID NO: 370 - protein, 247 aa, Cyanophage S-2L
  misc_feature: New ORF = left: 30118 right: 30858 frame: 2 size(aa): 247
APPTRSISSLAPARRTRSLPGWSSGSGAWNGPAGPPGAAMCSGQWATAPRPPPARSTCSWGASGHSPPWVWSPPPGPWLTRSCRWGCRPRTPRCGSGGSLPAWTTTPGSRRWPRRPQPSSASRSRRPRPASRRPTPDSAPWASPCPRCGTSTRASTRRPGTAARRPRRARAPSGSWPRPWAPGRSGATSSTRSWSRRRPSASRWPGSWASTPGSCARWRPRASSPGTSSSRPCRTSAPRGPTSWTPL

SEQ ID NO: 371 - protein, 101 aa, Cyanophage S-2L
  misc_feature: New ORF = left: 30128 right: 30430 frame: -3 size(aa): 101
SSRPAVSPRTRTSVFSACIPICRIELAMAPAVATTPRAANARRPPTSMSILPVAAWALLPIGPNTSRPPAVPPARSRPRSRCSIRASCVSAWRVPKTRSTW

SEQ ID NO: 372 - protein, 352 aa, Cyanophage S-2L
  misc_feature: New ORF = left: 30356 right: 31411 frame: 3 size(aa): 352
LDPADGDAGREHRGAGPGAHCRPGRLRPVPGGGPGGRSQVRPLAAGGPGRPRADLRPTPPPGLHPVRGAGRLRGLQHGGPERRLDGPGERGRLPAAGPGPGLRGAPGRRVQLDHGADAGHRHRGGPGHGHQRRAAARDGGRGQAHRGHRPQGPAEHPHRGGRQAGRLSEHDQRQRREAEKPVHRHGDGRGVWRHATDPPDAPGPKPAARPGHQECRRPGLRPAAGHGYRRGAPGQPGHRHRQRRRSHPRGPPGDPGYRQHARLPARETDLRPVHARRPRAAQPCPGAGPHPEGEGGQGRCYEEPQPWRWLERPRLPRLHHSEPDAGLAPEPGVRADERGLHQQGAPDAQPHA

SEQ ID NO: 373 - protein, 190 aa, Cyanophage S-2L
  misc_feature: New ORF = left: 30572 right: 31141 frame: -3 size(aa): 190
PSMLPIPWIAWRPPGMRPATLPMPMPRLTGSPPAIPMACCRAKPRPSAFLVAWSSSRFRAWSVRRIGGMTPDPTTVPMSMNRFFSFSTLALVVFREASSLSAPSVRMFCRALRTMSPVSLPSAAISRSCPALMPMTRATSMPMAGVCSMIELNSSPRSAPEPRAWASCRKAPSLSWAVEPPFRAAVLKPS

SEQ ID NO: 374 - protein, 498 aa, Cyanophage S-2L
  misc_feature: New ORF = left: 30969 right: 32462 frame: -1 size(aa): 498
DRGESALAVEAPGAGSGAGVAAPVERTHHLAEQTAQEPALVVLGDAPEARLQQHRRQRFERPGEAGLPVVGALDQVGEQPAQGAAPLLPKGIELALPLHLTVEGLLPVVELAGPGRAHPGGRHLAHGVPALQGPHRVGPPEGGLEPLDVVEPGAHGRLLLPGHLYQGVPQGLGELHLLALDLDSLGLGDVGPLLLGDGIPVQVGELVHSVHPVFVCGGLDPLLVGAGLGDLELGLGQGQGPAARAQTVLPLLLALGLFLCGLVCPLGPLHRHPAAALAVEPHQLGQPRGDPDPAAGGGDVHVVLVPPGVPSRAEQLVAERPGRPQAGLERLSPLDGEGIRAIELADVDGVKHVVGRPVPLVGEVPARPLVPLAPEPVPHLVRCDVGGEVGAARATATAAALRSSVLGLLLPPDAGLLLGTAALLEAFWHERAEGLFLGLVAEHAADTLDRLAAPGDATGDVADADAQVDREPPGDTHGLLQGEAQAVGILGGLVEQQV

SEQ ID NO: 375 - protein, 173 aa, Cyanophage S-2L
  misc_feature: New ORF = left: 30970 right: 31488 frame: 2 size(aa): 173
TCCSTRPPRMPTAWASPCSRPWVSPGGSRSTWASASATSPVASPGAARRSRVSAACSATSPRNRPSARSCQKASSSAAVPRSRPASGGRRRPRTLLRRAAAVAVARAAPTSPPTSQRTRCGTGSGARGTSGRAGTSPTRGTGRPTTCLTPSTSASSMARMPSPSSGLRRSRPA

SEQ ID NO: 376 - protein, 54 aa, Cyanophage S-2L
  misc_feature: New ORF = left: 31145 right: 31306 frame: -3 size(aa): 54
AGKSGPLEPPPRLRLFVAASLASFSLRMRACSWARLRCSRPSGMNGPKVCFSGW

SEQ ID NO: 377 - protein, 275 aa, Cyanophage S-2L
  misc_feature: New ORF = left: 31310 right: 32134 frame: -3 size(aa): 275
SSPALAGPTPAADISPTAFRRSRARTASGPRRVASSRSMLSSRGRMAASCFRATSTRASPRDLASSTCWRWISTPWALAMLARSSSVTASLYRSANSYIRSIRSLSAVAWIRCSSVLAWAILSSAWARARARPLVRRPSSRFCWRSASFSAASFAHSAPCIAIPPLPLPLSPISWASPGVTRIRPPGVGMCTWSLCPRGSRVGPNSWLPNAPVALRRASSALARWTAKAYEPSSSPMSMALSMWLGVRCPLLVKSPLVRSYPWLRSQSRIWFAVM

SEQ ID NO: 378 - protein, 362 aa, Cyanophage S-2L
  misc_feature: New ORF = left: 31472 right: 32557 frame: 3 size(aa): 362
GARGPPEGDRGVRQPAVRPDSGPPGAQGPRAHPHPRRPDPGHPGAGPADGAQRQGQRRDGDAGGRVGKRGRRERGRAPAEAGGRSAHERPGPGPGPGRAQDRPGQHRRAADPGHRRQRPDGPNVRVRRPVQGCRHRGGAGQHRQGPGSRDPAPAGGARQVPGGRPGRGGPEAGGGHAPPARQHRAARGHPPGARRGAGPGAPERRGRDVGRRGGPGQGRRALRPGAGPRPSGGAATRAQCPLGGGGPHPGRAVLRPGQGHRRLAGQPHPGARIAGVGAAAGGPPGHRREQPGRVPGRSAQPGDGFVRRGRLHRLRIPHRGPRRQGRIRRDPTPERDCRRSHPGAGGRRRHGQRRRDHGQRRQ

SEQ ID NO: 379 - protein, 117 aa, Cyanophage S-2L
  misc_feature: New ORF = left: 31618 right: 31968 frame: 2 size(aa): 117
WGSTARAAAGWRCRGPSGQTRPQRKRPSASRSGRTVCARAAGPWPWPRPSSRSPRPAPTSSGSRPPQTKTGWTECTSSPTCTGMPSPRRSGPTSPRPRESRSSASRWSSPSPWGTPW

SEQ ID NO: 380 - protein, 103 aa, Cyanophage S-2L
  misc_feature: New ORF = left: 31876 right: 32184 frame: -2 size(aa): 103
ARVAAPPDGRGPAPGRRARRPWPGPPRRPTSRPRRSGAPGPAPRRAPGGWPRAARCCRAGGAWPPPASGPPLPGRPPGTWRAPPAGAGSRLPGPWRCWPAPPR

SEQ ID NO: 381 - protein, 135 aa, Cyanophage S-2L
  misc_feature: New ORF = left: 31972 right: 32376 frame: 2 size(aa): 135
RWPGSRRRPCAPGSTTSSGSRPPSGGPTRCGPWSAGTPWARCRPPGWARPGPASSTTGSRPSTVRWSGNASSMPFGRRGAAPWAGCSPTWSRAPTTGRPASPGRSNRWRRCCCRRASGASPRTTRAGSWAVCSAR

SEQ ID NO: 382 - protein, 79 aa, Cyanophage S-2L
  misc_feature: New ORF = left: 32165 right: 32401 frame: -3 size(aa): 79
PPPSNEPITWLSRPPRNPPWLFSAMPRRPACSSTDASDSSARVRLACQSSVPLTRSENSPPRVRPPSSQRALSSRCRST

SEQ ID NO: 383 - protein, 51 aa, Cyanophage S-2L
  misc_feature: New ORF = left: 32371 right: 32523 frame: -2 size(aa): 51
PCRRRPPAPGCDRRQSRSGVGSRRIRPCRRGPRCGIRSRCSRPRRTNPSPG

SEQ ID NO: 384 - protein, 65 aa, Cyanophage S-2L
  misc_feature: New ORF = left: 32380 right: 32574 frame: 2 size(aa): 65
WVRSTGAATPAPDPAPGASTARADSPRSYTRTRLSSITPGGRRPAAAWSTSAGSRSTSPVTGPPR

SEQ ID NO: 385 - protein, 148 aa, Cyanophage S-2L
  misc_feature: New ORF = left: 32466 right: 32909 frame: -1 size(aa): 148
TPSSASWSRSSPSSLASFSGSPRPRPTGPAAGTAPGSARPRSPTAWASPGTGSVRCWPGDTGEPRGGASPSPGASAPLAGSQDASRAHLAQDLGRHRRLDPTGELPAPGGVYLGGPVTGDVDRDPADVDHAAAGRLPPGVIDDSLVRV

SEQ ID NO: 386 - protein, 167 aa, Cyanophage S-2L
  misc_feature: New ORF = left: 32492 right: 32992 frame: -3 size(aa): 167
PLLYAILGKSAVEHGCSRRSSHSISSDEHHPLHPGHDRRRLRWRHSLGHRDPDRPGPPLAPLRGQPGQDRRPPGRHPVPGPSDAGPVTPGSPGEGPLLPRGHQPRWPAARTPPGRIWRRISAVTAAWTPRASSPPPAASTSVVPSLATLTVIPPTLTMPPPAACPRV

SEQ ID NO: 387 - protein, 61 aa, Cyanophage S-2L
  misc_feature: New ORF = left: 32548 right: 32730 frame: -2 size(aa): 61
HRGAPGRGLSFPGGISPAGRQPGRLPGASGAGSRPSPPPGPHGRAPRPRRRLPRWSRHWRR

SEQ ID NO: 388 - protein, 62 aa, Cyanophage S-2L
  misc_feature: New ORF = left: 32561 right: 32746 frame: 3 size(aa): 62
RDHRGRRRRGRGARPWGPGGGDGRDPAPDAPGRRPGCRPAGLMPPGKERPLPGAPRCHRASI

SEQ ID NO: 389 - protein, 117 aa, Cyanophage S-2L
  misc_feature: New ORF = left: 32626 right: 32976 frame: 2 size(aa): 117
RPRSCARCAREASWLPASGADAPGEGEAPPRGSPVSPGQHLTDPVPGDAQAVGDLGLADPGAVPAAGPVGRGLGDPENDANEDGDDRDQDAEDGVHRRKCCGKSGGSIHARPPIYPV

SEQ ID NO: 390 - protein, 93 aa, Cyanophage S-2L
  misc_feature: New ORF = left: 32734 right: 33012 frame: -2 size(aa): 93
PACPHGSRFCMLYWVNRRSSMDAPAALPTAFPPMNTILCILVTIVAVFVGVILWVTETPTDRARRWHRSGVSQAKIADRLGVTRYRVRQMLAR

SEQ ID NO: 391 - protein, 90 aa, Cyanophage S-2L
  misc_feature: New ORF = left: 32750 right: 33019 frame: 3 size(aa): 90
RTRYRVTPRRSAILAWLTPERCQRRARSVGVSVTQRMTPTKTATIVTRMQRMVFIGGNAVGRAAGASMLDRRFTQYSIQKRLPWGHAGQL

SEQ ID NO: 392 - protein, 159 aa, Cyanophage S-2L
  misc_feature: New ORF = left: 32889 right: 33365 frame: 1 size(aa): 159
PGCRGWCSSEEMLWEERREHPCSTADLPSIAYRSGYRGGMPVSCNSQIDLGTLRVQVTATGQTSQRILAVQFGDGYRERRPDGINTEVRRWSVSTPPMGIADVLELEDALRALGTGAFAWAPPGEDDMVLWELDPVEWTRTYQADHLASLSFALRSANP

SEQ ID NO: 393 - protein, 156 aa, Cyanophage S-2L
  misc_feature: New ORF = left: 32970 right: 33437 frame: -1 size(aa): 156
TGRSRHPGPGVPPAARCLGWGPGSWVGRAQGKRQARQVVGLVGAGPLDRVELPEHHVVLAGGRPCERPGAQGPERILELQDVRDAHGRGGDRPAPHLGVDAIGASLPVPVPELHRKDALGRLPRSGDLHPEGAQVDLTVTADRHAPTVAASVCYTG

SEQ ID NO: 394 - protein, 227 aa, Cyanophage S-2L
  misc_feature: New ORF = left: 32980 right: 33660 frame: 2 size(aa): 227
HTEAATVGACRSAVTVRSTWAPSGCRSPLRGRRPSASLRCSSGTGTGSDAPMASTPRCGAGRSPPRPWASRTSWSSRMRSGPWAPGRSHGRPPARTTWCSGSSTRSSGPAPTRPTTWRACRLPCARPTHEPGPHPRHRAAGGTPGPGCRDRPVHPRPVDLRSGQGALPVLQLEPERRGRPVLRRRGVRADAGRVYRLPDQQQQRTERAPDAGLQRRPDLDRPGQRLG

SEQ ID NO: 395 - protein, 509 aa, Cyanophage S-2L
  misc_feature: New ORF = left: 33023 right: 34549 frame: 3 size(aa): 509
QSDRPGHPPGAGHRYGADVPAHPCGAVRGRVPGATPRWHQHRGAALVGLHPAHGHRGRPGARGCAPGPGHRGVRMGAPRRGRHGALGARPGRVDPHLPGRPPGEPVVCPALGQPMSPVPIPDIEQLAGLQDLDAVIDLFILDLSIFDPGRAPYRFCNWSQSGGVGLFYDGEEYEPMPVECTGFQINSNSAPSEPQMRVSNVGLTWTGLVNAWDDLVGAKLIRRRVLRRYLDDGATPSPTGHWPDEPWFIERKVAESKLTVTFALSTAFALDDVRLPKRLALRHTCSWTYRGEGCGYTGYPVADARNQPLPPPMDPALQAFYDAVALFRAQTPVVQAAEAAVAIQENAYNNSIEDSWSRLTTGYNRNFPYSFVFTYPTGSLQALFGVNLIYSGGVLIPALNQTWRRGAIRAQNFDGSAYYEIEQWQFNPGNRATALANLNSARSALAAARAVLESRRATALSLKAAADAIRDPRDQCSKTIAGCRLRFFDPLTGATLPLPTSAFPGLQIG

SEQ ID NO: 396 - protein, 94 aa, Cyanophage S-2L
  misc_feature: New ORF = left: 33029 right: 33310 frame: -3 size(aa): 94
VRVHSTGSSSQSTMSSSPGGAHANAPVPRARSASSSSRTSAMPMGGVETDQRRTSVLMPSGRRSRYPSPNCTARMRWDVCPVAVTCTRRVPRSI

SEQ ID NO: 397 - protein, 112 aa, Cyanophage S-2L
  misc_feature: New ORF = left: 33142 right: 33477 frame: -2 size(aa): 112
GALPGSKIDRSRMNRSITASRSWSPASCSMSGMGTGLMGWPSAGQTTGSPGGRPGRCGSTRPGRAPRAPCRPRRGAPMRTPRCPGPGAHPRAPGRPRCPWAGWRPTSAAPRC

SEQ ID NO: 398 - protein, 414 aa, Cyanophage S-2L
  misc_feature: New ORF = left: 33314 right: 34555 frame: -3 size(aa): 414
GSPDLEPWKGRCWQRQCSARQRIEEPEAAAGDRLTALVPGVPDGVGRRLERQGRGPPRLEHGPGSRQGRPGRVEVRQGGRPVARIELPLLDLVVGRAVEVLGPDGAPPPGLVQGGDQDAPGVDQVDAEQRLERAGRVREDEAVGEVAVVPRRQAGPAVLDAVVVGVLLNGHCSLGRLDDGGLGPEQGHRVVERLERRVHGWGQGLIPGVGHGVPGVAASLAPVGPAAGVAQGQALGQPDVVQGERCRQGERDGQLALGDLALDEPRLVRPVACRAGRGPVVEVPAQDPPPDQLRPHQVIPGVDQAGPGQADVGDPHLGLARCAVAVDLEAGTLDRHRLVLLAVVEQADPAALAPVAEPVGRPARIEDRQVEDEQVDHGIQVLESRQLLDVWDGDRAHGLAERRANDRLARWSAW

SEQ ID NO: 399 - protein, 67 aa, Cyanophage S-2L
  misc_feature: New ORF = left: 33429 right: 33629 frame: 1 size(aa): 67
STCSSSTCRSSIRAGRPTGSATGARAAGSACSTTARSTSRCRSSVPASRSTATAHRASPRCGSPTSA

SEQ ID NO: 400 - protein, 120 aa, Cyanophage S-2L
  misc_feature: New ORF = left: 33526 right: 33885 frame: -2 size(aa): 120
VQLQVWRRARRLGSRTSSRANAVDRANVTVSLLSATLRSMNHGSSGQWPVGLGVAPSSRYRRRTRRRISFAPTRSSQALTRPVQVRPTLETRIWGSLGALLLLIWKPVHSTGIGSYSSPS

SEQ ID NO: 401 - protein, 263 aa, Cyanophage S-2L
  misc_feature: New ORF = left: 33664 right: 34452 frame: 2 size(aa): 263
PGGGEADPAAGPAPVPRRRGHAQPDRPLAGRAVVHRAQGRREQADRHVRPVDSVRPGRRPAAQAPGPAPHLQLDLPGRGMRLHRVPRGRRPESAPAPTHGPGAPSVLRRGGPVPGPDPRRPGGRGCSGHSRERLQQQHRGQLVPPDDGVQPQLPLQLRLHVPDRLAPGAVRRQPDLLRGRPDPRLEPDLAEGRHPGPKLRRLGLLRDRAVAVQSGQPGDRPGEPQLCPVGPGGCPGRARVEAGHGPVAQGGGRRHPGPPGPVQ

SEQ ID NO: 402 - protein, 100 aa, Cyanophage S-2L
  misc_feature: New ORF = left: 33798 right: 34097 frame: 1 size(aa): 100
PSRSPCRQRSPWTTSGCPSAWPCATPAAGPTGARDAATPGTPWPTPGISPCPHPWTRRSKRSTTRWPCSGPRPPSSRRPRLQWPFKRTPTTTASRTAGPA

SEQ ID NO: 403 - protein, 112 aa, Cyanophage S-2L
  misc_feature: New ORF = left: 33804 right: 34139 frame: -1 size(aa): 112
RRSCRGSCGCTPSSGGTSCPRCCCCRRSLEWPLQPRPPGRRGSGPGTGPPRRRTLGAPGPWVGAGADSGRRPRGTRCSRIPRPGRSSCRCGAGPGAWAAGRRPGRTLSTGRT

SEQ ID NO: 404 - protein, 91 aa, Cyanophage S-2L
  misc_feature: New ORF = left: 34221 right: 34493 frame: 1 size(aa): 91
TRPGGGAPSGPKTSTARPTTRSSSGSSIRATGRPPWRTSTLPGRPWRLPGPCSSRGGPRPCRSRRRPTPSGTPGTSAVRRSPAAASGSSIR

SEQ ID NO: 405 - protein, 95 aa, Cyanophage S-2L
  misc_feature: New ORF = left: 34279 right: 34563 frame: -2 size(aa): 95
CGKDHPIWSPGKADVGNGNVAPVSGSKNRRRQPAIVLLHWSRGSRMASAAALSDRAVARLDSSTARAAARADRAELRFARAVARLPGLNCHCSIS

SEQ ID NO: 406 - protein, 271 aa, Cyanophage S-2L
  misc_feature: New ORF = left: 34456 right: 35268 frame: 2 size(aa): 271
DDRRLPPPVLRSADGRYIAVANIGLSRAPDRVILTALQKNDIRMFSRGGLVQEACGFVLGDGRVVRCLNTHPEPENAFQIDPEAYARADGEHGVTAVWHSHARLDGFSPEDQAAIRADGELPWIVYCLRTDEFHVVDPLDHGPLVGRSFCYGILDCYSLVRDALEERHGVAFPEWHRGNWGEWGRPDFTVFDMQASEFCRRVGRERLLPGDIVFMGKDHTSHIGILEDSDRMLHHLAGRRSRVEYYGEWWQARTRSIWRPAGCQPRWAAVG

SEQ ID NO: 407 - protein, 338 aa, Cyanophage S-2L
  misc_feature: New ORF = left: 34497 right: 35510 frame: 1 size(aa): 338
RALHCRCQHRPFQGSRSGDPYRTTEERHPDVQPRWPRPGGLWLRPGRRPGGPVPQHPPRAGERFPDRPGGLRPGRRGAWGHRRLAQPRPARWVQPGGPGRHPGRRRAPLDRLLPAHRRVSRRGPPRPRAPGRALVLLRHPRLLQPGAGRPGGAPWGGLPRVAPGQLGRVGAPRLHRVRHAGQRVLSAGRPGAAAARGHRLHGQGPHLAHRDPRGQRPHAPPPGRQAEPGRVLRRVVAGPDPFDLAAGGMPAQVGSRRIGPQSRGAAPMSITNDELHTRFTYHPVKEGQTEVYQQIRHKARELAELMLHLVPEGREQSTALTKVEEACFWANAGVARRT

SEQ ID NO: 408 - protein, 67 aa, Cyanophage S-2L
  misc_feature: New ORF = left: 34506 right: 34706 frame: -1 size(aa): 67
ASGSIWKAFSGSGWVLRHRTTRPSPRTKPQASWTRPPRLNIRMSFFCSAVRITRSGALERPMLATAM

SEQ ID NO: 409 - protein, 106 aa, Cyanophage S-2L
  misc_feature: New ORF = left: 34553 right: 34870 frame: 3 size(aa): 106
SLPHYRRTTSGCSAEVASSRRPVASSWATAGWSGASTPTPSRRTLSRSTRRPTPGQTGSMGSPPSGTATPGSMGSARRTRPPSGPTASSPGSSTACAPTSFTSWTP

SEQ ID NO: 410 - protein, 101 aa, Cyanophage S-2L
  misc_feature: New ORF = left: 34567 right: 34869 frame: -2 size(aa): 101
GVHDVKLVGAQAVDDPGELAVGPDGGLVLRAEPIEPGVAVPDGGDPMLPVCPGVGLRVDLESVLRLGVGVEAPDHPAVAQDEATGLLDEATSAEHPDVVLL

SEQ ID NO: 411 - protein, 80 aa, Cyanophage S-2L
  misc_feature: New ORF = left: 34778 right: 35017 frame: -3 size(aa): 80
SRGAPTRPSCPGATLGRPPHGAPPGRPAPGCSSRGCRSRTSARPGARGLGGPRRETRRCAGSRRSRGARRRPGWRPGPPG

SEQ ID NO: 412 - protein, 144 aa, Cyanophage S-2L
  misc_feature: New ORF = left: 34873 right: 35304 frame: -2 size(aa): 144
STWAQRLATVALSYGCPPGLASRRPPDRTGPGLPPLAVVLDPAPPAGQVVEHAVAVLEDPDVRGVVLAHEDDVPGQQPLPAYPPTELAGLHVEHGEVGAPPLAPVAPVPLWEGHPMALLQGVPHQAVAVEDAVAERAPDQGPVV

SEQ ID NO: 413 - protein, 62 aa, Cyanophage S-2L
  misc_feature: New ORF = left: 34874 right: 35059 frame: 3 size(aa): 62
TTGPWSGARSATASSTATAWCGTPWRSAMGWPSQSGTGATGASGGAPTSPCSTCRPASSVGG

SEQ ID NO: 414 - protein, 88 aa, Cyanophage S-2L
  misc_feature: New ORF = left: 34926 right: 35189 frame: -1 size(aa): 88
YSTRLRLPARWWSMRSLSSRIPMCEVWSLPMKTMSPGSSRSRPTRRQNSLACMSNTVKSGRPHSPQLPRCHSGKATPWRSSRASRTRL

SEQ ID NO: 415 - protein, 67 aa, Cyanophage S-2L
  misc_feature: New ORF = left: 35063 right: 35263 frame: 3 size(aa): 67
AGSGCCPGTSSSWARTTPRTSGSSRTATACSTTWPAGGAGSSTTASGGRPGPVRSGGRRDASPGGQP

SEQ ID NO: 416 - protein, 79 aa, Cyanophage S-2L
  misc_feature: New ORF = left: 35099 right: 35335 frame: -3 size(aa): 79
VNRVWSSSLVIDMGAAPRDCGPILRLPTWAGIPPAARSNGSGPATTRRSTRPGSACRPGGGACGRCPRGSRCARCGPCP

SEQ ID NO: 417 - protein, 112 aa, Cyanophage S-2L
  misc_feature: New ORF = left: 35193 right: 35528 frame: -1 size(aa): 112
RWFICSGAAGDAGIGPEAGLLDLGQGSRLLPPLGHQVEHELGELPGLVPDLLVDFRLPLLDGVVGEPGVELVVGDRHGRSASRLWPYPTAAHLGWHPAGRQIERVRACHHSP

SEQ ID NO: 418 - protein, 84 aa, Cyanophage S-2L
  misc_feature: New ORF = left: 35267 right: 35518 frame: 3 size(aa): 84
DRATVARRCAHVDHQRRAPHPVHLPPRQGGADGSLPADPAQGPGARRAHAPPGARGAGAVDCPDQGRGGLLLGQCRRRPPHLSR

SEQ ID NO: 419 - protein, 61 aa, Cyanophage S-2L
  misc_feature: New ORF = left: 35272 right: 35454 frame: 2 size(aa): 61
GHSREALRPCRSPTTSSTPGSPTTPSRRGRRKSTSRSGTRPGSSPSSCSTWCPRGGSSRLP

SEQ ID NO: 420 - protein, 54 aa, Cyanophage S-2L
  misc_feature: New ORF = left: 35372 right: 35533 frame: -3 size(aa): 54
RSAGSSAQVRRATPALAQKQASSTLVRAVDCSRPSGTRWSMSSASSRALCRICW

SEQ ID NO: 421 - protein, 253 aa, Cyanophage S-2L
  misc_feature: New ORF = left: 35413 right: 36171 frame: -2 size(aa): 253
ASYELPRNEAQETPGAAHVDRAADRQVAQGEADHERVLDPPEAVDHRDRAPLAPRAGGVAVEARLQLLGVGIDRRPGRPGEEASDAPQHQGTAGQQQARGRQAQEADAPGERAQGDKRDAGQDPPEAATAGQDRGKHQRLPGDARLGPVLVQAPGIVRHDPPADAPPGLLDHPGPEGRVQGAEGPDRLGRRLNDKPVDAAELSAEGAQELDRDVALVHLLRCGGRRRHWPRSRPPRPWSGQSTAPAPRAPGGA

SEQ ID NO: 422 - protein, 236 aa, Cyanophage S-2L
  misc_feature: New ORF = left: 35458 right: 36165 frame: 2 size(aa): 236
PRSRRPASGPMPASPAAPEQMNQRYVTIKLLGAFGREFGRIHRLVVETPAEAVRALCTLYPAFRPRVIEQAGRGIGWRIVTDDPRGLDEDRAQAGIPGQTLVFAPILTGRGGFGRILAGVAFIALGAFTGGIGFLGLSSSSLLLTGGALVLGGVAGLLTRTPRAPVDADTKQLESSLYSNAAGTGGQGSPVPVIYGLRRVENPLVISFSLGNLPISRPINVSGSRGLLGLVAGQFV

SEQ ID NO: 423 - protein, 152 aa, Cyanophage S-2L
  misc_feature: New ORF = left: 35532 right: 35987 frame: -1 size(aa): 152
RLDSSCLVSASTGARGVLVRRPATPPSTRAPPVSSRLEDDRPRKPMPPVNAPRAINATPARIRPKPPRPVRIGANTSVCPGMPAWARSSSRPRGSSVTIRQPMPRPACSITRGRKAGYRVQRARTASAGVSTTSRWMRPNSRPKAPRSLIVT

SEQ ID NO: 424 - protein, 93 aa, Cyanophage S-2L
  misc_feature: New ORF = left: 35543 right: 35821 frame: -3 size(aa): 93
TRRRPGSARSRHGRSGSGQTPASARGCPPGPGPRPGPGDRPSRSASRCPARPARSPGAGRPGTGCRGPGPPRPASQRQAGGCGRTLGRRRPGA

SEQ ID NO: 425 - protein, 1456 aa, Cyanophage S-2L
  misc_feature: New ORF = left: 35598 right: 39965 frame: 1 size(aa): 1456
DAGRGGPGPLHPVPGLPAPGDRAGRAGHRLADRDGRSPGPGRGPGPGGHPRADAGVCPDPDRPWRLRADPGRRRVYRPGRVHRGHRLPGPVVLEPAADRRCPGAGGRRWPPHQDAPGAGRCRHQAAGVEPLQQRRRHGGPGEPGPGDLRPPAGREPARDQLLLGQPADQPPDQRERLPGSPGPRCGAVRMKLISGAGGIGGGGTKKPRAPITSPDSAFLRSISFAQMQFLLCEGPIWGPKEGRSWGGLLASTYLDDTPLSVRGLGGTVPVEDLVLSYGTFDQTAVPGYGVQWNTIGVGQSVKASFPVFATAMPSDPTTQHRARVVLTWEALLVAFKQTGDVVEAQVPYLIDYTDANGVVRLVFAGFTFGKFSGPFQREHEWDLAGPGPWVVRVMRMAADDDALETPIASFRSAFSFTNLSFGPVLSLGRRYSATLTLAARADRYSNLPAVAIDLYGKICKVPTNYDPWAGTYSGVWDGSFKEDWTDNPAWCFYDMVTNPRYGLGESIDPVLIDKWSLYSIGQYCDGLVPAVGGGLERRFRCNLILAAQNDAWVVLQQLASIFRGQIFWSAGLVVSTQDAPGDFLYTFNPSNVEQTVDDSGAVVQPCFEYEGTAKRTRHTVCLVSWDDPANAYQPRVEYIADSDALARLGYRPLELRLNGITTRGQALRTAQWALLSEAILDDTVTFKVGAIGMALRPGDLVKVMDPDKGGVRFGGRVVAQDGDTITLDAAPPTPLAGWAGGLFYWQSGAGLPRVNVAGVSGAVVTVSGWGDDSRPTPGMPWLLEVPNLEAQPFRILGIEELGQNRYAVTALRYRSDIYDRVDFDTPLSDDEDYLFKLLDPLPPTILNAQIVWDNSQAKLEVNWRPQDRVFVDGGFDLSTSYHRLQYQRGEVGAGGEVTWTNQWAEVDRQTDTTETIPLVGYQAQTRYKVRMASVGKAGAESLWSAELEATPLEVWFPIPDFESIVPHPGGETGPAGVLSHTNLATGGHLWTWKIFTQVPPYARSIEVWGRPVGVPLPDGVTTDEDGYILLGTAAPNAGVEALLPVAATWDVRARLTTFVPGLEGRSFMLDMVDRLEIVPPTPTEFRLVTEQDGQSRMGSRRFSWLMPDPPPFAERWGGGLVSDIAGFEVRYRSGVDVGWEGAFPLLSDGVPGDTFWFETHLMDYGTFTVMLRARDRTGWVSDEMAVVTVGIGQPLPTNVLTLLDLSLEGWPGDLANGTVVGSTSPLFYFPPTTEDLYEAPLEEAIYSGRSGGELVQNDPAQPMVYRALLEVEVDGSALLIYTESDTGSYRWRLEDISTVGLGLRYVAPTTDPMYDVAEEAPFHLGEFLSGGAGLHPYAPHQKLTAGLWQISLEAIASTTNVPARIQDVDVVLDVPDVVWTIEDYEAGVGVTSVPLPPGLFRRVKAVSMAVQDDTVAAGVAVGGRIVYKGTDRIDLRTVDASGADTAALVDLIVVGY

SEQ ID NO: 426 - protein, 602 aa, Cyanophage S-2L
  misc_feature: New ORF = left: 36042 right: 37847 frame: -1 size(aa): 602
PGPRLPIEQPSRPAGEGCRGCRVERDRVAVLGNHPTAEADPALVRVHDLDKIPRAQGHADGAHLERHRVVQDRLRQERPLGRPQGLPPGGDAVEPELQRPVAKAGQGIAVRDVLHPGLVGVGRVVPGDQTDGVPGAFGRALILEAGLDDRARVVDGLLDVGWVERVQEVPGGVLGADHQAGTPKDLPPEDRRQLLEDHPGVVLGGQDQVAPKPPLQPPADGGHQAVAVLADGIEGPLVDQHRIDRLAQAVPGVRHHVVEAPGGVVGPVLLEAPVPHPAVGAGPGVVVRGYLADLAVQVDGDRRQVGVPVRPGGQGERGTVPAPQRQHRAKAEIREAERRAERRDRRFEGVVVCGHPHDPDHPGPRAGQVPFVLPLERPAELAEGEAGEHESDDPVGVGVVDQVRHLGLDDVARLLERDEQRLPGEDHPGPVLGGRVAGHRRGEHRERCLDGLADPDGVPLDPVPRDRRLVEGAVAQHQVFYGHRAAQAPDGQRGVVQVGAGQEAAPAAPLLRPPDRPLAQEELHLGEADRAQEGAVRAGDGRPGLLGPAAADAAGSRDELHTNCPATRPRRPREPLTLIGRLIGRLPKEKLITSGFSTRRRP

SEQ ID NO: 427 - protein, 79 aa, Cyanophage S-2L
  misc_feature: New ORF = left: 36116 right: 36352 frame: -3 size(aa): 79
VLARRPPQLRPSFGPQIGPSHRRNCIWAKLIERRKALSGLVMGARGFLVPPPPMPPAPEMSFIRTAPQRGPGDPGSRSR

SEQ ID NO: 428 - protein, 434 aa, Cyanophage S-2L
  misc_feature: New ORF = left: 36122 right: 37423 frame: 3 size(aa): 434
AAPGVSWASLRGSSYEAHLWSRRHRRRRDQEAPGAHHQPGQRLPALDQLRPDAVPPVRGADLGAEGGAQLGRPPGQHLPGRHPAVRPGPGRHGARRRPGAELRHLRPDGGPGVRGPVEHHRGRPVRQGIVPGVRHGDAQRPDHPAPGPGGPHLGGAARRVQADGRRRRGPGAVPDRLHRRQRGRPTRVRRLHLRQVQRAVPAGARMGPGRPGALGGPGHADGRRRRRPRNADRVVPLGVQLHESQLWPGAVSGAPVQCHAHPGRPGGPVLQPAGGRHRPVRQDLQGTHELRPLGRHLQRGVGRELQGGLDRQPRLVLLRHGDEPQVRPGRVDRSGADRQVVPLFHRPVLRRPGARRRRGAGAAVSVQPDPGRPERRLGGPPAAGVDLPGADLLECRPGGQHPGRPRGLPVHVQPIQRRADRRRLWRGRPALLRV

SEQ ID NO: 429 - protein, 79 aa, Cyanophage S-2L
  misc_feature: New ORF = left: 36169 right: 36405 frame: 2 size(aa): 79
SSSLEPAASAAAGPRSPGRPSPARTAPSCARSASPRCSSSCARGRSGGRRRGAAGAASWPAPTWTTPRCPSGAWAARCP

SEQ ID NO: 430 - protein, 78 aa, Cyanophage S-2L
  misc_feature: New ORF = left: 36265 right: 36498 frame: -2 size(aa): 78
RTGRPRWCSTGPRTPGPPSGRRCRSSAPGLLRAPCRPGPGRTAGCRPGRCWPGGRPSCAPPSAPRSAPRTGGTASGRS

SEQ ID NO: 431 - protein, 73 aa, Cyanophage S-2L
  misc_feature: New ORF = left: 36424 right: 36642 frame: 2 size(aa): 73
ATAPSTRRRSRGTGSSGTPSGSASPSRHRSRCSPRRCPATRPPSTGPGWSSPGRRCSSRSSRRATSSRPRCRT

SEQ ID NO: 432 - protein, 74 aa, Cyanophage S-2L
  misc_feature: New ORF = left: 36428 right: 36649 frame: -3 size(aa): 74
SIRYGTWASTTSPVCLNATSSASQVRTTRARCWVVGSLGIAVANTGNDALTDWPTPMVFHWTPYPGTAVWSKVP

SEQ ID NO: 433 - protein, 146 aa, Cyanophage S-2L
  misc_feature: New ORF = left: 36646 right: 37083 frame: 2 size(aa): 146
STTPTPTGSSDSCSPASPSASSAGRSSGSTNGTWPARGPGWSGSCGWPQTTTPSKRRSRRSARRSASRISALARCCLWGAGTVPRSPWPPGRTGTPTCRRSPSTCTARSARYPRTTTPGPAPTAGCGTGASRRTGPTTPPGASTTW

SEQ ID NO: 434 - protein, 112 aa, Cyanophage S-2L
  misc_feature: New ORF = left: 36653 right: 36988 frame: -3 size(aa): 112
FVGTLQILPYRSMATAGRLEYRSARAARVSVALYRRPRDSTGPKLRFVKLNAERNDAIGVSRASSSAAIRMTRTTQGPGPARSHSCSRWNGPLNLPKVKPANTSRTTPLASV

SEQ ID NO: 435 - protein, 93 aa, Cyanophage S-2L
  misc_feature: New ORF = left: 37039 right: 37317 frame: -2 size(aa): 93
PPGRHSKRSAPGRSTPAAGGPPRRRSGRPGSGCTETAAPAPRRRRAPGRRSTGRWNRGTTCRSAPDRSTRPGRTWGSSPCRRSTRRGCRSSPP

SEQ ID NO: 436 - protein, 113 aa, Cyanophage S-2L
  misc_feature: New ORF = left: 37151 right: 37489 frame: -3 size(aa): 113
ALAGSSQETRQTVCRVRLAVPSYSKQGWTTAPESSTVCSTLDGLNVYRKSPGASWVLTTRPALQKICPRKIDASCWRTTQASFWAARIRLHRNRRSSPPPTAGTRPSQYWPME

SEQ ID NO: 437 - protein, 140 aa, Cyanophage S-2L
  misc_feature: New ORF = left: 37228 right: 37647 frame: 2 size(aa): 140
SWPPRTTPGWSSSSWRRSSGGRSFGVPAWWSAPRTPPGTSCTRSTHPTSSRPSTTLARSSSPASSMRARPNAPGTPSVWSPGTTRPTPTSPGWSTSRTAMPWPALATGRWSSGSTASPPGGRPCGRPSGRSCRRRSWTTR

SEQ ID NO: 438 - protein, 69 aa, Cyanophage S-2L
  misc_feature: New ORF = left: 37360 right: 37566 frame: -2 size(aa): 69
AGAPAAGSQGGPGHRCPRCTPPGAGRRWPGRPRRPDRRCAGCVWPCPHTRSRAGRPRQSRRRSARRWMG

SEQ ID NO: 439 - protein, 337 aa, Cyanophage S-2L
  misc_feature: New ORF = left: 37427 right: 38437 frame: 3 size(aa): 337
GHGQTHPAHRLSGLLGRPGQRLPAPGGVHRGQRCPGPPWLPAAGAPAQRHHHPGAGPADGPVGAPVGGDPGRHGDVQGGRHRHGPAPWGSCQGHGPGQGRGPLRRSGGCPGRRHDHARRGTPDTPRRLGGRAVLLAVGGRATPGQRGGGLRGRRDGLRLGRRQPAHPRHALAAGGAQPGGPAVPHPGYRGARPEPVRRHGPALPVRHLRPGGLRYPALGRRGLPVQAAGPAAPDDPECPDRLGQQPGQARGQLAPPRPGIRRWRFRPVHLLPPAPVPAGRGRGWRGGHLDQSVGGGRPTDRHHRDDPPGGVPGADPVQGPDGVGGQSRRRVALVGGA

SEQ ID NO: 440 - protein, 93 aa, Cyanophage S-2L
  misc_feature: New ORF = left: 37547 right: 37825 frame: -3 size(aa): 93
NSPPAQPARGVGGAASSVIVSPSWATTRPPKRTPPLSGSMTLTRSPGRRAMPMAPTLNVTVSSRIASDRSAHWAVRRACPRVVMPLSRSSSGR

SEQ ID NO: 441 - protein, 79 aa, Cyanophage S-2L
  misc_feature: New ORF = left: 37651 right: 37887 frame: 2 size(aa): 79
RSRWAPSAWPCALGILSRSWTRTRAGSASAVGWLPRTATRSRSTRHPRHPSPAGREGCSIGSRGPGYPGSTWRGSPGPS

SEQ ID NO: 442 - protein, 68 aa, Cyanophage S-2L
  misc_feature: New ORF = left: 37829 right: 38032 frame: -3 size(aa): 68
RRAVTAYRFWPSSSIPRMRNGWASRLGTSSSQGMPGVGRLSSPQPETVTTAPETPATLTRGSPAPDCQ

SEQ ID NO: 443 - protein, 707 aa, Cyanophage S-2L
  misc_feature: New ORF = left: 37851 right: 39971 frame: -1 size(aa): 707
RLVADHDQVHQGRRVGPGGVHRPQVDPVGALVDDAPPDGHPGGHGVVLHRHRNRLDPAEQPRWQRDRCDAHTGLVVLDRPDDVGHVEDHIDVLDPGGHVGSAGDGLEADLPQAGGQLLVGGVGVEPRPAAQELAQVEWRLLGDVVHRVGRRGDVPEPQADRADVLKPPAVRPGVGFCVDQQGAAVYLHLQQGPVDHGLGRVVLDELTAAPAAVDRLLQGRLVQVLGGGWEVEQRASRADHGAVCQISRPALQRQVEQRKDVGGQGLADAHRHDRHLIGDPPGPVPGPEHDREGPVVHQVGLEPEGVPGDAVGQQGESALPAHIDAAPVAHLETGDVAHQAAAPALGERWRVRHEPREPAAAHPALAVLLGDQAELGGGGGDDLQAVHHVEHERPPLQAGHKRGQPGPHVPGSCHGQQGLDAGIRGSGAQKDVAVLVGGDAVGQWHPDGPPPHLDRAGVRRHLGEDLPGPEVAASGQVRVRQDASRAGLAPGVRDDRLEVGDREPHLERRGLKLRRPERLGAGFAHRRHPDLVPGLRLVPHQGDRLGGVGLSVYLRPLIGPGDLPASPDLAPLVLEPVVGGGQVETAIDEYPVLGAPVDLELGLAVVPDDLGIQDRRGQRVQQLEQVVLVVRERGIEVHPVVDVGPVAQGRDGVPVLAELLDTQDAERLGLQVGHLQQPGHAGGGPAVVAPAGDRHDGPGDPRHVDPG

SEQ ID NO: 444 - protein, 53 aa, Cyanophage S-2L
  misc_feature: New ORF = left: 37861 right: 38019 frame: -2 size(aa): 53
RRTGSGRAPRYPGCGTAGPPGWAPPAARACRGWAGCRRPSRRPSRRPRRPPPR

SEQ ID NO: 445 - protein, 81 aa, Cyanophage S-2L
  misc_feature: New ORF = left: 37891 right: 38133 frame: 2 size(aa): 81
RSPAGATTAGPPPACPGCWRCPTWRPSRSASWVSRSSARTGTPSRPCATGPTSTTGWTSIPRSRTTRTTCSSCWTRCPRRS

SEQ ID NO: 446 - protein, 59 aa, Cyanophage S-2L
  misc_feature: New ORF = left: 38137 right: 38313 frame: 2 size(aa): 59
MPRSSGTTARPSSRSTGAPKTGYSSMAVSTCPPPTTGSSTSGARSGLAGRSPGPISGRR

SEQ ID NO: 447 - protein, 59 aa, Cyanophage S-2L
  misc_feature: New ORF = left: 38290 right: 38466 frame: -2 size(aa): 59
GTTPRAAWPQAPPTRATRRRLCPPTPSGPCTGSAPGTPPGGSSRWCRSVGLPPPTDWSR

SEQ ID NO: 448 - protein, 98 aa, Cyanophage S-2L
  misc_feature: New ORF = left: 38303 right: 38596 frame: -3 size(aa): 98
GGTWVKIFQVQRWPPVARFVCDRTPAGPVSPPGCGTIDSKSGIGNHTSSGVASSSADQSDSAPALPTDAIRTLYRVCAWYPTRGIVSVVSVCRSTSAH

SEQ ID NO: 449 - protein, 148 aa, Cyanophage S-2L
  misc_feature: New ORF = left: 38317 right: 38760 frame: 2 size(aa): 148
TDRPTPPRRSPWWGTRRRPGTRSGWRRWAKPAPSRSGRRSLRPRRSRCGSLSPTSSRSSRTPGARPARLASCRTRTWPLAATSGPGRSSPRCRLTPARSRCGGGPSGCHCPTASPPTRTATSFWAPLPRMPASRPCCPWQLPGTCGPG

SEQ ID NO: 450 - protein, 234 aa, Cyanophage S-2L
  misc_feature: New ORF = left: 38441 right: 39142 frame: 3 size(aa): 234
GHAARGVVPYPRLRVDRPAPRGRDRPGWRPVAHEPGHWRPPLDLEDLHPGAALRPLDRGVGAARRGATARRRHHRRGRLHPFGHRCPECRRRGPAARGSYLGRAGPADHVCARPGGAVVHARHGGPPGDRPPHPHRVPPGHRAGRPEPDGQPPVLLAHAGPATVRRALGRRPGERHRRFRGALPERRRCGLGGRFPPAVRRRPRGHLLVRDPPDGLRDLHGHAPGPGPDRVGLR

SEQ ID NO: 451 - protein, 103 aa, Cyanophage S-2L
  misc_feature: New ORF = left: 38678 right: 38986 frame: -3 size(aa): 103
RTSKPAMSLTRPPPQRSANGGGSGMSQENRRLPIRLWPSCSVTRRNSVGVGGTISRRSTMSSMNDRPSRPGTNVVSRARTSQVAATGSRASTPAFGAAVPKRM

SEQ ID NO: 452 - protein, 65 aa, Cyanophage S-2L
  misc_feature: New ORF = left: 38764 right: 38958 frame: 2 size(aa): 65
PRLCPAWRGGRSCSTWWTAWRSSPPPPPSSAWSPSRTARAGWAAAGSLGSCRTRHRSPSAGAAAW

SEQ ID NO: 453 - protein, 61 aa, Cyanophage S-2L
  misc_feature: New ORF = left: 38914 right: 39096 frame: -2 size(aa): 61
RSRSPSGGSRTRRCPRGRRRTAGGKRPPSPHRRRSGSAPRNRRCRSPGRRPSARRTVAGPA

SEQ ID NO: 454 - protein, 63 aa, Cyanophage S-2L
  misc_feature: New ORF = left: 39089 right: 39277 frame: -3 size(aa): 63
NSGLVEPTTVPFARSPGQPSSDRSSSVRTLVGRGWPMPTVTTAISSETHPVRSRARSMTVKVP

SEQ ID NO: 455 - protein, 85 aa, Cyanophage S-2L
  misc_feature: New ORF = left: 39160 right: 39414 frame: 2 size(aa): 85
RWASASPCPPTSLRCSTCRWRAGLEIWQTAPWSARLARCSTSHPPPRTCTRRPWRRRSTAAGAAVSSSRTTRPSPWSTGPCWRWR

SEQ ID NO: 456 - protein, 72 aa, Cyanophage S-2L
  misc_feature: New ORF = left: 39268 right: 39483 frame: -2 size(aa): 72
CPQAASGTTRCRILCRSAGRCRLPPPPAGPGRPWAGPGRSGRAHRRSGRCRSPPPGAPRTGPRWWVGSRTAG

SEQ ID NO: 457 - protein, 55 aa, Cyanophage S-2L
  misc_feature: New ORF = left: 39440 right: 39604 frame: -3 size(aa): 55
GWSPAPPLRNSPRWNGASSATSYIGSVVGATYRSPRPTVLMSSSRQRYDPVSDSV

SEQ ID NO: 458 - protein, 169 aa, Cyanophage S-2L
  misc_feature: New ORF = left: 39479 right: 39985 frame: 3 size(aa): 169
GHQHGRPGAPVRRPDDRPDVRRRRGGAIPPGRVPERRGGAPPLRPPPEADRRPVADQPRGHRQHYQRARPDPGRRCGPRRARRRLDDRGLRGRCGRHIGPAATGAVPPGQGGFDGGAGRHRGRRGGRRGAHRLQGHRPDRPADGGRLRGRHGGPGGPDRGRLLVATVLA

SEQ ID NO: 459 - protein, 53 aa, Cyanophage S-2L
  misc_feature: New ORF = left: 39487 right: 39645 frame: -2 size(aa): 53
SATGRRSASGGGRRGGAPPRRSGTRPGGMAPPRRRRTSGRSSGRRTGAPGRPC

SEQ ID NO: 460 - protein, 107 aa, Cyanophage S-2L
  misc_feature: New ORF = left: 39628 right: 39948 frame: 2 size(aa): 107
PPACGRSASRPSPALPTCPPGSRTSMWSSTCPTSSGRSRTTRPVWASHRSRCHRGCSAGSRRFRWRCRTTPWPPGWPSGGASSTRAPTGSTCGRWTPPGPTRRPWWT

SEQ ID NO: 461 - protein, 115 aa, Cyanophage S-2L
  misc_feature: New ORF = left: 39808 right: 40152 frame: -2 size(aa): 115
DDCGRIDGLILVGGVHPTQGLGQVLQQLADADPELLPGDSQVVEAVGFAPDRQVGHASTVATSSRPRSGPPGPPCRPRRRPPSAGRSGRCPCRRCAPRRPPRRPRCRPAPPSKPP

SEQ ID NO: 462 - protein, 424 aa, Cyanophage S-2L
  misc_feature: New ORF = left: 39952 right: 41223 frame: 2 size(aa): 424
SWSATSRYSAGMTNLPIRGETDSLDNLAVTREEFRVGIGQLLEYLAQALGGVDTTYEDQPVDPTAVVLQGEPVLDIDAVPEAADDSLRVPSTSWVQDEIAGLLDDYVAKTGGVMTGDLRVPSLNGGALAGLRNMLINGDFRIDQRNTGGAYGLTAGAAFIYGADRWLGFCSGANVSAQRITVAGTQVDPNRMQFNGAASVTAIGIGQRIEAASSRHLAGRQATLSANFSNSLLTTVSWEAFYANSSDSFGTRASPTRTSFASGTFAVTSSYTRYSATFDVPAAATTGIEIVFTVGAQTSGTWVVGQAQLEEGVQVTPFERRPLGLETALCQRYFTFFPVNVRAAAPGAGALYAHSVSFPQRMRANPTLGSIVPDPEGPGALNLNGAGITVTGATTYGVLVQMVVNSPGADSYYLHFRASATAEL

SEQ ID NO: 463 - protein, 181 aa, Cyanophage S-2L
  misc_feature: New ORF = left: 39969 right: 40511 frame: 1 size(aa): 181
SLQCWHDQPADPGRNRQPRQPGCHPGGVPGRHRPAAGVPGPGPGWGGHHLRGSARRSDRSRPTGRAGARHRRGAGGGRRQPAGALDVLGTRRDRGPPRRLRGQDRRRHDRRPAGAQPQRWGAGRTAQHADQRRFPHRPAEHWGRLWPDGRGSFHLRCRPLARLLQWGQRLGATHHGGGHPG

SEQ ID NO: 464 - protein, 101 aa, Cyanophage S-2L
  misc_feature: New ORF = left: 39989 right: 40291 frame: 3 size(aa): 101
PTCRSGAKPTASTTWLSPGRSSGSASASCWSTWPRPWVGWTPPTRISPSIRPQSSYRASRCSTSTRCRRRPTTACGCPRRPGYKTRSRASSTTTWPRPAAS

SEQ ID NO: 465 - protein, 83 aa, Cyanophage S-2L
  misc_feature: New ORF = left: 40040 right: 40288 frame: -3 size(aa): 83
RRRSWPRSRRGGPRSRLVPRTSRAPAGCRRPPPAPRRCRAPARPVGRLRSDRRADPRRWCPPHPGPGPGTPAAGRCRPGTPPG

SEQ ID NO: 466 - protein, 301 aa, Cyanophage S-2L
  misc_feature: New ORF = left: 40156 right: 41058 frame: -2 size(aa): 301
AQRRIGPHPLWEADAVSVEGPSPWGRRPDVDRKEREVALAKGCFQPKRSPLEGGYLDPLFQLRLTDHPGAGRLRPDCENDLDASRCRRRHIEGGAVPRVGACNCEGAGGERRPGRGGPGAEAVATVCVERLPRNSGEEAVAEVGRERRLPARQVAAAGRLNALPDADGSDARCPVELHTVGVNLGARHRDALRRDVGPTAEAEPAVGTVDESCPGRQAIGAPSVPLVDAEIAVDQHVAQSGQRPTVEAGHPQVAGHDAAGLGHVVVEEARDLVLYPGRRGHPQAVVGRLRHRVDVEHRLAL

SEQ ID NO: 467 - protein, 161 aa, Cyanophage S-2L
  misc_feature: New ORF = left: 40412 right: 40894 frame: 3 size(aa): 161
RPGQLSSTVPTAGSASAVGPTSRRNASRWRAPRLTPTVCSSTGQRASLPSASGSALRRPAAATWRAGRRRSRPTSATASSPLFRGRRSTQTVATASAPGPPLPGRLSPPAPSQLQAPTRGTAPPSMCRRRQRLASRSFSQSGRRRPAPGWSVRRSWKRGSR

SEQ ID NO: 468 - protein, 80 aa, Cyanophage S-2L
  misc_feature: New ORF = left: 40434 right: 40673 frame: -1 size(aa): 80
NASHETVVRRLLLKLAESVACLPARWRLLAASMRCPMPMAVTLAAPLNCIRLGSTWVPATVMRCAETLAPLQKPSQRSAP

SEQ ID NO: 469 - protein, 135 aa, Cyanophage S-2L
  misc_feature: New ORF = left: 40689 right: 41093 frame: 1 size(aa): 135
RQLRHPGLPYPDVFRLRHLRSYKLLHAVQRHLRCAGGGNDWHRDRFHSRGADVRHLGGRSGAVGRGGPGNPLRAATAWAGNSPLPALLHVLSGQRQGGGPRGWGPLRSQRQLPTADAGQSDAGLNRARSGRPWGA

SEQ ID NO: 470 - protein, 67 aa, Cyanophage S-2L
  misc_feature: New ORF = left: 40898 right: 41098 frame: 3 size(aa): 67
PPSSGDRLGWKQPFASATSRSFRSTSGRRPQGLGPSTLTASASHSGCGPIRRWAQSCPIRKALGRLT

SEQ ID NO: 471 - protein, 53 aa, Cyanophage S-2L
  misc_feature: New ORF = left: 41062 right: 41220 frame: -2 size(aa): 53
FGGGGGSEVQVVGVRPGGVDHHLHQDPVGGRARDGDAGAVQVKRPRAFRIGHD

SEQ ID NO: 472 - protein, 190 aa, Cyanophage S-2L
  misc_feature: New ORF = left: 41097 right: 41666 frame: 1 size(aa): 190
LERRRHHRHGRDHLRGPGADGGQLPRGGLLLPALQSLRHRRTMSYRLTDSSSVVRLADGATIPADPRNTDRQEYEAWLAAGNVPEPAPAPGAPPLALGDWGAFLELVIAAPVYQTIYAQSAQSLPVNTAFTAISGALVLGAGGRPNLAGLQSGVDQLLQAAVLTAEDLDQLRDIAEQTGIPLQIPTPTPQ

SEQ ID NO: 473 - protein, 152 aa, Cyanophage S-2L
  misc_feature: New ORF = left: 41102 right: 41557 frame: 3 size(aa): 152
TAPASPSRARPPTGSWCRWWSTPPGRTPTTCTSEPPPPPNYELPSDRFQQRRPSRRRRHHPRRPPQHRPAGIRGMAGRRERPGACPGTGGAPARPGRLGGLPGARDRRPGLPDDLRPVGAVAAGEYRLHRHLGGPGVGRRGAPQPGRPTVGC

SEQ ID NO: 474 - protein, 118 aa, Cyanophage S-2L
  misc_feature: New ORF = left: 41190 right: 41543 frame: -1 size(aa): 118
AGQVGAPPGAQHQGPRDGGEGGIHRQRLRRLGVDRLVDRGGDHELQEGPPIAQGERGRPRCRGRLRDVPGGQPCLVFLPVGVAGVGGDGGAVGETDDAAGIGQTVAHSSAVAEALKCR

SEQ ID NO: 475 - protein, 87 aa, Cyanophage S-2L
  misc_feature: New ORF = left: 41224 right: 41484 frame: -2 size(aa): 87
RRYSPAATAPTGRRSSGRPGRRSRAPGRPPNRPGRAGAPPVPGQAPGRSRRPAMPRIPAGRCCGGRRGWWRRRRDGRRCWNRSDGSS

SEQ ID NO: 476 - protein, 67 aa, Cyanophage S-2L
  misc_feature: New ORF = left: 41231 right: 41431 frame: -3 size(aa): 67
TGAAITSSRKAPQSPRASGGAPGAGAGSGTFPAASHASYSCRSVLRGSAGMVAPSARRTTLLESVRR

SEQ ID NO: 477 - protein, 59 aa, Cyanophage S-2L
  misc_feature: New ORF = left: 41239 right: 41415 frame: 2 size(aa): 59
PIPAASSVSPTAPPSPPTPATPTGRNTRHGWPPGTSRSLPRHRGRPRSPWAIGGPSWSS

SEQ ID NO: 478 - protein, 594 aa, Cyanophage S-2L
  misc_feature: New ORF = left: 41447 right: 43228 frame: -3 size(aa): 594
VPLVALTAGDIDVDNEDVRRHQGRQHGQQDGGEPGRSIHEWAGSLGALGHGTQAPIDSELPRIICPQPADERLEIGQGPEADAAGRPGEHVLVTVQVSFDGRASGLARAKPGERHRRGAQALAPAGVIVVFAAGPGDVLDAPEPLRDRLHAAALAAGPGAEDLVPGLAADGQEIALGDAAVHPLEAQELEAPAVDLPGAGQEESGLLGLGRPAPQVALGHPAVPEPLLDVAAGVDVQEHRPGHLRELALGELGRQGGVAVGGPVPVPACVVGERQEGGLLVGGELGPVGDGLGQGRLVLLDPGAQHLVGLRCGDRVALADRPAVGHPGAAPADRPGIALGAGVGIGLELAPLEQLDQGQGPIHRFRGVGLAVAAGPGGVLVEHLLGGHPLGDGVKQHRGTGDLVGLPLEEPEPVEEPALRHRPRHRSAPQLGDLVAQGLQVLTDGLDLLVLAAQGAGHGDQLGERLQDAVEPLEPATQEGQELVEGEQHQEDHAQGVEAADIGTGRGGERADLLDQGLERHCGVGVGICRGMPVCSAMSRSWSRSSAVRTAACSSWSTPDCRPARLGRPPAPNTRAPEMAVKAVFTGSDCADWA

SEQ ID NO: 479 - protein, 161 aa, Cyanophage S-2L
  misc_feature: New ORF = left: 41488 right: 41970 frame: -2 size(aa): 161
DIGRVIAQRPSLEIWSRRDSRSLRMASICSSSRRRGRAMATSWVNDCRTPLNRLNRPPRKGRSSSRANSTRKTTPRGSRLPTSAPVGAGSGLICWTRDWSVIAGWGWGSAGGCRSARRCRAAGPGLRRSGPQPAAAGQHPTVGRPGWGAPRRPTPGPPRWR

SEQ ID NO: 480 - protein, 129 aa, Cyanophage S-2L
  misc_feature: New ORF = left: 41561 right: 41947 frame: 3 size(aa): 129
PAAAGCGPDRRRPGPAARHRRADRHPPADPHPHPAMTLQSLVQQISPLPAPTGADVGSLDPLGVVFLVLFALDELLPFLGGRFKRFNGVLQSFTQLVAMARPLRREDEQIEAIRKDLESLRDQISKLGR

SEQ ID NO: 481 - protein, 105 aa, Cyanophage S-2L
  misc_feature: New ORF = left: 41587 right: 41901 frame: 2 size(aa): 105
PPKTWTSCATSPSRPASPCRSPPPPRNDAPIPGPTDQPAPRPDRCRCRQPRPPGRGLPGAVRPRRAPALPGWPVQAVQRRPAVVHPAGRHGPPPAPRGRADRGHP

SEQ ID NO: 482 - protein, 95 aa, Cyanophage S-2L
  misc_feature: New ORF = left: 41670 right: 41954 frame: 1 size(aa): 95
RSNPWSNRSARSPPRPVPMSAASTPWAWSSWCCSPSTSSCPSWVAGSSGSTASCSRSPSWSPWPAPCAARTSRSRPSVRTWSPCATRSPSWGAER

SEQ ID NO: 483 - protein, 115 aa, Cyanophage S-2L
  misc_feature: New ORF = left: 41841 right: 42185 frame: -1 size(aa): 115
ARAPRTAGSGAGPDPPISRCWAGCSGGPRGRPRRAPARRAPPGRWRQTASRHRRPGGAPPRRTGTGRGTGFETSAASSLSAPAWRSGRAGTPGPYGWPRSARPRGAGGGPWRPAG

SEQ ID NO: 484 - protein, 381 aa, Cyanophage S-2L
  misc_feature: New ORF = left: 41951 right: 43093 frame: 3 size(aa): 381
AMTRPMSQSRFLDRFRFFEGEPHQVSGASMLFDAISQGVPAEQVLDEDAPWARRYSQPNTSKSVDRALPLIQLFEGRELKAYPDPGTKGDPWTIGWGSTRMPDGRPVRKGDTVTAAQADQMLRTWVEQDEAALAKAIPNWAKLTTDQQAALLSFTYNAGRDWYGPSNGYATLSAKLAEGKLSEVPRAMLLYVNPGSDVEEGLRNRRMAEGDLWGRPPQAQKPRLLLTRTRQIDGRGLELLRLQRMHGSVSKGDLLTVSGQARNQVFRTGASSKSGSMEPIPEGLWRVENIAWAGGKDNYNASWGEGLGPASVPLTWLGPGKTGRSAIEAHLDSNQNVFPGTAGCIGFRSLADLQTFIGWLRADDPRELTVDWGLGTVPKRP

SEQ ID NO: 485 - protein, 67 aa, Cyanophage S-2L
  misc_feature: New ORF = left: 41958 right: 42158 frame: 1 size(aa): 67
RGRCLKAGSSTGSGSSRGSPTRSPVPRCCLTPSPRGCPPSRCSTRTPPGPAATASPTPRNRWIGPCP

SEQ ID NO: 486 - protein, 266 aa, Cyanophage S-2L
  misc_feature: New ORF = left: 42049 right: 42846 frame: 2 size(aa): 266
RHLPGGARRAGARRGRPLGPPLQPAQHLEIGGSGPAPDPAVRGARAQGLSRPRHQGRSLDDRLGQHPDARRPAGPQGRHGHRSAGRPDAAHLGRAGRGGPGQGHPQLGQAHHRPAGRPPVVHLQRRPGLVRALQRLRHPVGQARRGQALGGAPGDAPVRQPRQRRRGGAPEPPDGRGRPVGPAAPGPEAQTPPDPHPADRRPGPRAPAPPADARQRLQGRSPDRQRPGPEPGLPHRGQQQERQHGADPGGALARREHRLGRRQRQL

SEQ ID NO: 487 - protein, 155 aa, Cyanophage S-2L
  misc_feature: New ORF = left: 42162 right: 42626 frame: 1 size(aa): 155
SSCSRGASSRPIPTPAPRAIPGRSAGAAPGCPTAGRSARATRSPQRRPTRCCAPGSSRTRRPWPRPSPTGPSSPPTSRPPSCRSPTTQAGTGTGPPTATPPCRPSSPRASSRRCPGRCSCTSTPAATSRRGSGTAGWPRATCGAGRPRPRSPDSS

SEQ ID NO: 488 - protein, 73 aa, Cyanophage S-2L
  misc_feature: New ORF = left: 42196 right: 42414 frame: -2 size(aa): 73
VNDRRAACWSVVSLAQLGMALARAASSCSTQVRSIWSACAAVTVSPLRTGRPSGIRVLPQPIVQGSPLVPGSG

SEQ ID NO: 489 - protein, 129 aa, Cyanophage S-2L
  misc_feature: New ORF = left: 42457 right: 42843 frame: -2 size(aa): 129
LSLPPAQAMFSTRQSPSGIGSMLPLLLLAPVRKTWFRAWPLTVRRSPLETLPCIRWRRRSSRPRPSICRVRVRRSLGFWAWGGRPHRSPSAIRRFRSPSSTSLPGLTYRSIARGTSESLPSASLADRVA

SEQ ID NO: 490 - protein, 64 aa, Cyanophage S-2L
  misc_feature: New ORF = left: 42528 right: 42719 frame: -1 size(aa): 64
RSGDRPWRRCRASAGGAGARGPGRRSAGCGSGGVWASGPGAAGPTGRPRPSGGSGAPPRRRCRG

SEQ ID NO: 491 - protein, 132 aa, Cyanophage S-2L
  misc_feature: New ORF = left: 42717 right: 43112 frame: 1 size(aa): 132
PSAARPGTRSSAPGPAARAAAWSRSRRGSGASRTSPGPAAKTTITPAGARAWAPRRCRSPGLALARPDARPSKLTWTVTKTCSPGRPAASASGPWPISRRSSAGCGQMILGSSLSIGAWVPCPSAPNDPAHS

SEQ ID NO: 492 - protein, 56 aa, Cyanophage S-2L
  misc_feature: New ORF = left: 42723 right: 42890 frame: -1 size(aa): 56
AAPTRGPGPRPSWRYSCLCRRPRRCSRRARAPPGSAPCCRSCCWPRCGRPGSGPGR

SEQ ID NO: 493 - protein, 51 aa, Cyanophage S-2L
  misc_feature: New ORF = left: 42940 right: 43092 frame: -2 size(aa): 51
GRLGTVPRPQSTVSSRGSSARSQPMNVWRSARDRKPMQPAVPGNTFWLLSR

SEQ ID NO: 494 - protein, 110 aa, Cyanophage S-2L
  misc_feature: New ORF = left: 43097 right: 43426 frame: 3 size(aa): 110
RPRPFVNRPAWFSAILLTMLAALMTAHILVIHVDVASCQSHKRYLLEQRRTGSLPQELRNVPDLVEAECADLEGKFRSVVDQWVSVILSLLGGAGVAAAMGKPPTDQPGR

SEQ ID NO: 495 - protein, 172 aa, Cyanophage S-2L
  misc_feature: New ORF = left: 43120 right: 43635 frame: 2 size(aa): 172
TGLVLRHPADHAGGPDDGAHPRYPRRCRQLSEPQAVPTRAAPHRQPAPGAPERARPGGGGMRRPGGQVSERRGPVGVGDLESARWRGGRRGHGQTADGSAGALTPDAHQGSHQAERQYERGEDHGTSGGIVGHARARERRRCRLPSGTQPSGPMPSSLTGTHTTPGRRWQDP

SEQ ID NO: 496 - protein, 61 aa, Cyanophage S-2L
  misc_feature: New ORF = left: 43170 right: 43352 frame: 1 size(aa): 61
RRTSSLSTSMSPAVRATSGTYSSSAAPAACPRSSGTCPTWWRRNAPTWRASFGASWTSGCR

SEQ ID NO: 497 - protein, 84 aa, Cyanophage S-2L
  misc_feature: New ORF = left: 43188 right: 43439 frame: -1 size(aa): 84
ASGVNAPADPSAVCPWPRRPPRHRADSRSPTPTGPRRSETCPPGRRIPPPPGRARSGAPGAGCRCGAARVGTACGSDSWRHRRG

SEQ ID NO: 498 - protein, 67 aa, Cyanophage S-2L
  misc_feature: New ORF = left: 43213 right: 43413 frame: -2 size(aa): 67
SVGGLPMAAATPAPPSRLKITDTHWSTTLRNLPSRSAHSASTRSGTFRSSWGRLPVRRCSSRYRLWL

SEQ ID NO: 499 - protein, 88 aa, Cyanophage S-2L
  misc_feature: New ORF = left: 43213 right: 43413 frame: -2 size(aa): 67
SHGLRLARTVSRPDGCPGEHLGSTPRLIRRRFAHGRGDPRATEQTQDHRHPLVHDAPKLALQVGAFRLHQVGHVPELLGQAAGAALLE

SEQ ID NO: 500 - protein, 58 aa, Cyanophage S-2L
  misc_feature: New ORF = left: 43417 right: 43590 frame: -2 size(aa): 58
AAWHGARWLGSTGEAAPSPLSGSRMSYDPAASPMVFASLVLSLGLMAALVSIWGQRPG

SEQ ID NO: 501 - protein, 59 aa, Cyanophage S-2L
  misc_feature: New ORF = left: 43458 right: 43634 frame: -1 size(aa): 59
GSCHLRPGVVCVPVKLLGMGPDGWVPLGRRHLRRSLARACPTIPPLVPWSSPRSYCLSA

SEQ ID NO: 502 - protein, 111 aa, Cyanophage S-2L
  misc_feature: New ORF = left: 43499 right: 43831 frame: -3 size(aa): 111
SSPMARSPTTCPSGTSPTSRPPGLSSSRTPPSGTGTPPATSRTCCSWPSTTATPWRRRMHLRDTLKDPATSVLVLCVFLLSCLAWGPMAGFHWGGGTFAALWLAHVLRSRR

SEQ ID NO: 503 - protein, 111 aa, Cyanophage S-2L
  misc_feature: New ORF = left: 43500 right: 43832 frame: 1 size(aa): 111
RRDRRTCASQRAAKVPPPQWNPAIGPHAKQLNRNTHNTRTEVAGSLSVSRRCIRRLQGVAVVDGQEQQVLDVAGGVPVPLGGVRELDSPGGLEVGDVPDGQVVGDRAIGEL

SEQ ID NO: 504 - protein, 175 aa, Cyanophage S-2L
  misc_feature: New ORF = left: 43594 right: 44118 frame: -2 size(aa): 175
AWPPISRTKATRPPTPSKPPPSSLPPDDHPPQSPAPDDPPRHQRRAPHVPGALRPSLRPVPPAHQVGPGPGPALVEPEAPSGRPRDVPEPGGRRARAPQWPDHLPPARPVHPPPQGRRGCRALERPPVERAHHQRRRGPAAPGRQRRRPPGGGGCTCVTRLRILPPPSWCCVCSC

SEQ ID NO: 505 - protein, 56 aa, Cyanophage S-2L
  misc_feature: New ORF = left: 43639 right: 43806 frame: 2 size(aa): 56
ACHAGASAASRGSPSLTARSSRSSTSLVVCPFHWGAFESSTAPAALRWGMYRTGRW

SEQ ID NO: 506 - protein, 329 aa, Cyanophage S-2L
  misc_feature: New ORF = left: 43647 right: 44633 frame: -1 size(aa): 329
PARPGAVPPGAGCPRPRPCPPGGAPMRPRRPRSGPWACRTAQRPSRPMEATSRASRGPLRPRASLRPSSAPGASVAGSHPTAPPPMPDCPHFTTAQMLGLETALQCAWEDLRLERAVGCSPKQAATYFVQHLDGSLPFLQRLGATRARRAGRARAVPRAAPGACLPSQSYAERGRPSPGQRLHALRRHPNRLPPRYRPMTTPRKALLQTTRPDTSDGHHTFRELYAHRYALFLLLIKWAPVQAQPWWSRKHHLAGPEMYPNQVVAGLELPNGPITYHLPVRYIPHLKAAGAVELSNAPQWNGHTTSDVEDLLLLAVNDGDPLEAADAPA

SEQ ID NO: 507 - protein, 67 aa, Cyanophage S-2L
  misc_feature: New ORF = left: 43835 right: 44035 frame: -3 size(aa): 67
PPPAKPCSRRPAPTPATGTTRSGSSTPIATPCSSCSSSGPRSRPSPGGAGSTIWPAQRCTRTRWSPG

SEQ ID NO: 508 - protein, 84 aa, Cyanophage S-2L
  misc_feature: New ORF = left: 43836 right: 44087 frame: 1 size(aa): 84
PGDHLVRVHLWAGQMVLPAPPGLGLDRGPLDEQEEQGVAMGVELPERVVPVAGVGAGRLEQGFAGGGHRAVTRREAVWMASEGV

SEQ ID NO: 509 - protein, 142 aa, Cyanophage S-2L
  misc_feature: New ORF = left: 43931 right: 44356 frame: 3 size(aa): 142
AGGTGRSDGRRAPGTCGARRWCRGGSSGAGLCGGWSSGGNEEGGGLDGVGGRVAFVLEMGGHAQRKIETVGKLRGQPWGRPGLFRLAGPVSRPGAAGMAGCRRGAGRNRWLPAWASSLRRARGADPPRRIGGRFRGPASGRW

SEQ ID NO: 510 - protein, 81 aa, Cyanophage S-2L
  misc_feature: New ORF = left: 44039 right: 44281 frame: -3 size(aa): 81
AARPSRQPPISSSTSTAACHSCSAWARHGPGEPEEPGPSPGLPPELAYRLNLTLSVAAHLQDKGYTPSDAIQTASLLVTAR

SEQ ID NO: 511 - protein, 83 aa, Cyanophage S-2L
  misc_feature: New ORF = left: 44122 right: 44370 frame: -2 size(aa): 83
LPPFHHRPDAGPRNRPPMRLGGSAPRARRRLLAQAGSHLFRPAPRRQPAIPAAPGRDTGPASRKSPGRPQGCPRSLPTVSILR

SEQ ID NO: 512 - protein, 179 aa, Cyanophage S-2L
  misc_feature: New ORF = left: 44142 right: 44678 frame: 1 size(aa): 179
ASSGGSPGDGPGSSGSPGPCRAQALQEWQAAVEVLDEIGGCLLGRAAYGALEAQILPGALEGGFEAQHLGGGEMGAVRHGRRSGGMRAGDGCAGRRGGPQRGPGPQRAPGRPGGGLHWAAGALGRPAGPGATPGAPGAHRSPSRWTWPWPGAASPGGHRPRTGRSSGSRPGPRATTAPG

SEQ ID NO: 513 - protein, 181 aa, Cyanophage S-2L
  misc_feature: New ORF = left: 44285 right: 44827 frame: -3 size(aa): 181
RLHPRPGAPRLAWAAARQPGGLADPAQGLRPAPRRHPLRGPLARGPGRLHPGAVVARGPGRLPDDRPVLGRCPPGLAAPGHGHVHLEGLRCAPGAPGVAPGPAGRPSAPAAQWRPPPGRPGARCGPGPRCGPPLRPAHPSPALIPPLRLPCLTAPISPPPRCWASKPPSNAPGRICASSAP

SEQ ID NO: 514 - protein, 127 aa, Cyanophage S-2L
  misc_feature: New ORF = left: 44360 right: 44740 frame: 3 size(aa): 127
NGGSQAWEAERWDESRRRMRRAQRRAAARPGAAAGPGTPGRWPPLGGWGAGPSGRPRGHSGGAGGASEPLQVDMAVAGGSQPRGAPPQDGPVIRKPTGAPRHDGTGMKPTGAPRQGPPEGVPPRGGS

SEQ ID NO: 515 - protein, 227 aa, Cyanophage S-2L
  misc_feature: New ORF = left: 44374 right: 45054 frame: -2 size(aa): 227
TTPPRPGPKPRAAHALRLLGDRGRPPRRRPLHPGADPPDRRPPPGDLRRHTGGRMRLLLLLLALVPAAAWADAPPDGFIPDPGRPGWRGQRPDSPAVWQTPPRAYDPPLGGTPSGGPWRGAPVGFIPVPSWRGAPVGFRMTGPSWGGAPRGWLPPATAMSTWRGSDAPPAPPEWPLGLPDGPAPQPPNGGHLPGVPGPAAAPGLAAALLCARRIRRRLSSHRSASHA

SEQ ID NO: 516 - protein, 171 aa, Cyanophage S-2L
  misc_feature: New ORF = left: 44401 right: 44913 frame: 2 size(aa): 171
EPATDAPGAEEGRSEARGRSGPRDAREVASIGRLGRWAVRQAQGPLRGRRGRIGAPPGGHGRGRGQPAPGGTAPGRAGHPEADRGPAPRRHRDEADRGPAPGAPGGGAAEGRVVGPGRGLPDRRAVGPLPTPAGAPRVGDEAVRWGVGPGRSRHQGQQEQQEPHAASCMAA

SEQ ID NO: 517 - protein, 84 aa, Cyanophage S-2L; identical to SEQ ID NO: 8
  misc_feature: New ORF = left: 44637 right: 44888 frame: -1 size(aa): 84

SEQ ID NO: 518 - protein, 168 aa, Cyanophage S-2L
  misc_feature: New ORF = left: 44744 right: 45247 frame: 3 size(aa): 168
ALGGVCQTAGLSGRCPRQPGRPGSGMKPSGGASAQAAAGTRASRSSRSLMRPPVWRRRSPGGGRRSGGSAPGCRGRRRGGRPRSPSRRRACAARGFGPGRGGVVHWGTPWVEVGSQPPCPSTRSTRRCPDRACGWRGSPSSCAGHLIINNQSIWEDKSIFGFSPCNPV

SEQ ID NO: 519 - protein, 120 aa, Cyanophage S-2L
  misc_feature: New ORF = left: 44823 right: 45182 frame: 1 size(aa): 120
SRQVGRRPRPQPAPGPAGAAGASCGLLYGGVDLPEAVAGLADLLRGAGDDVEADGPGLRADVGHVRLEASGRVEGASFTGAPPGSRWAPSRRAPAPDPPGDAQIELAAGEDLLPLVLATS

SEQ ID NO: 520 - protein, 128 aa, Cyanophage S-2L
  misc_feature: New ORF = left: 44831 right: 45214 frame: -3 size(aa): 128
FVFPNGLVVNYEVASTRGRRSSPAASSIWASPGGSGAGARRLGAHLDPGGAPVNDAPSTRPEASSRTCPTSARRPGPSASTSSPAPRSRSARPATASGRSTPPYRRPHEAPAAPAGPGAGCGLGRRPT

SEQ ID NO: 521 - protein, 96 aa, Cyanophage S-2L
  misc_feature: New ORF = left: 44892 right: 45179 frame: -1 size(aa): 96
GGQHKRKEILASRKLDLGIAGWIWCWGTAAGSPPRPRGCPSERRPLDPARSLEPHMPYVCSETGAVRLDVVPCTPEQIRQTGDRLREIYAAIQEAA

SEQ ID NO: 522 - protein, 59 aa, Cyanophage S-2L
  misc_feature: New ORF = left: 44892 right: 45179 frame: -1 size(aa): 96
GMCGSRLRAGSRGRRSLGHPLGRGGLPAAVPQHQIHPAMPRSSLRLARISFLLCWPPHN

SEQ ID NO: 523 - protein, 63 aa, Cyanophage S-2L
  misc_feature: New ORF = left: 45058 right: 45246 frame: -2 size(aa): 63
TGLQGENPKIDLSSQMDWLLIMRWPAQEEGDPRQPQARSGHRRVDLVLGHGGWEPTSTQGVPQ

SEQ ID NO: 524 - protein, 79 aa, Cyanophage S-2L
  misc_feature: New ORF = left: 45189 right: 45425 frame: -1 size(aa): 79
NYLFFVKVGLVNPEKPLPSLGRPLAEQFVILFPILGNLKLYHSFLETFRLLKKGVYSGVKRDYKVKTRKLICLPKWIGC

SEQ ID NO: 525 - protein, 60 aa, Cyanophage S-2L
  misc_feature: New ORF = left: 45241 right: 45420 frame: 2 size(aa): 60
SRLTPEYTPFFNSLKVSKKEWYNFKLPRIGNKITNCSAKGLPSEGSGFSGLTNPTLTKNK

SEQ ID NO: 526 - protein, 52 aa, Cyanophage S-2L
  misc_feature: New ORF = left: 45250 right: 45405 frame: -2 size(aa): 52
GWVGQPGKTATLAWKALSGAICNFISNSWQFKVVPFLLGDFQAIEKGGVLWS

SEQ ID NO: 527 - protein, 70 aa, Cyanophage S-2L
  misc_feature: New ORF = left: 45356 right: 45565 frame: -3 size(aa): 70
KKEVGFKGKVEVGFNEGNYKKKGIYRVLNECQEIEGSVMSFFRFGFKIICFLLRLGWSTRKNRYPRLEGP
